(19) United States
(12) Patent Application Publication
(10) Pub. No.: US 2002/0040489 A1
(43) Pub. Date: Apr. 4, 2002

(54) Expressed sequences of arabidopsis thaliana

(76) Inventors: Jorn Gorlach, Durham, NC (US); Yong-Qiang An, San Diego, CA (US); Carol M. Hamilton, Apex, NC (US); Jennifer L. Price, Raleigh, NC (US); Tracy M. Raines, Durham, NC (US); Yang Yu, Martinsville, NJ (US); Joshua G. Rameaka, Durham, NC (US); Amy Page, Durham, NC (US); Abraham V. Mathew, Cary, NC (US); Brooke L. Ledford, Holly Springs, NC (US); Jeffrey P. Woessner, Hillsborough, NC (US); William David Haas, Durham, NC (US); Carlos A. Garcia, Carrboro, NC (US); Maja Kricker, Pittsboro, NC (US); Ted Slater, Apex, NC (US); Keith R. Davis, Durham, NC (US); Keith Allen, Cary, NC (US); Neil Hoffman, Chapel Hill, NC (US); Patrick Hurban, Raleigh, NC (US)

Correspondence Address: PARADIGM GENETICS, INC, 104 ALEXANDER DRIVE, BUILDING 2, P O BOX 14528, RTP, NC, 277094528

(21) Appl. No.: 09/770,152

(22) Filed: Jan. 26, 2001

Related U.S. Application Data
(60) Provisional application No. 60/178,503, filed on Jan. 27, 2000.

(51) Int. Cl. A01H 5/00; C12Q 1/00; C07H 21/04

(52) U.S. Cl. 800/288; 435/4; 536/23.2; 536/23.6

(57) ABSTRACT

Isolated nucleotide compositions and sequences are provided for Arabidopsis thaliana genes. The nucleic acid compositions find use in identifying homologous or related genes; in producing compositions that modulate the expression or function of its encoded protein, mapping functional regions of the protein; and in studying associated physiological pathways. The genetic sequences may also be used for the genetic manipulation of cells, particularly of plant cells. The encoded gene products and modified organisms are useful for screening of biologically active agents, e.g. fungicides, insecticides, etc.; for elucidating biochemical pathways; and the like.

### CROSS-REFERENCE TO RELATED APPLICATION

[0001] This application claims the benefit of U.S. Provisional Application 60/178,503 Filed Jan. 27, 2000.

### FIELD OF INVENTION

[0002] The invention is in the field of polynucleotide sequences of a plant, particularly sequences expressed in arabidopsis thaliana.

### BACKGROUND OF THE INVENTION

[0003] Plants and plant products have vast commercial importance in a wide variety of areas including food crops for human and animal consumption, flavor enhancers for food, and production of specialty chemicals for use in products such as medicaments and fragrances. In considering food crops for humans and livestock, genes such as those involved in a plants resistance to insects, plant viruses, and fungi; genes involved in pollination; and genes whose products enhance the nutritional value of the food, are of major importance. A number of such genes have been described, see, for example, McCaskill and Croteau (1999) Nature Biotechnol. 17:31-36.

[0004] Despite recent advances in methods for identification, cloning, and characterization of genes, much remains to be learned about plant physiology in general, including how plants produce many of the above-mentioned products; mechanisms for resistance to herbicides, insects, plant viruses, fungi; elucidation of genes involved in specific biosynthetic pathways; and genes involved in environmental tolerance, e.g., salt tolerance, drought tolerance, or tolerance to anaerobic conditions.

[0005] Arabidopsis thaliana is a model system for genetic, molecular and biochemical studies of higher plants. Features of this plant that make it a model system for genetic and molecular biology research include a small genome size, organized into five chromosomes and containing an estimated 20,000 genes, a rapid life cycle, prolific seed production and, since it is small, it can easily be cultivation in limited space. A. thaliana is a member of the mustard family (Brassicaceae) with a broad natural distribution throughout Europe, Asia, and North America. Many different ecotypes have been collected from natural populations and are available for experimental analysis. The entire life cycle, including seed germination, formation of a rosette plant, bolting of the main stem, flowering, and maturation of the first seeds, is completed in 6 weeks. A large number of mutant lines are available that affect nearly all aspects of its growth. These features greatly facilitate the isolation of fundamentally interesting and potentially important genes for agronomic development

[0006] Most gene products from higher plants exhibit adequate sequence similarity to deduced amino acid sequences of other plant genes to permit assignment of probable gene function, if it is known, in any higher plant. It is likely that there will be very few protein-encoding angiosperm genes that do not have orthologs or paralogs in Arabidopsis. The developmental diversity of higher plants may be largely due to changes in the cis-regulatory sequences of transcriptional regulators and not in coding sequences.

[0007] Many advances reported over the past few years offer clear evidence that this plant is not only a very important model species for basic research, but also extremely valuable for applied plant scientists and plant breeders. Knowledge gained from Arabidopsis can be used directly to develop desired traits in plants of other species.

### RELEVANT LITERATURE

[0008] Cold Spring Harbor Monograph 27 (1994) E. M. Meyerowitz and C. R. Somerville, eds. (CSH Laboratory Press). Annual Plant Reviews, Vol. 1: Arabidopsis (1998) M. Anderson and J. A. Roberts, eds. (CRC Press). Methods in Molecular Biology: Arabidopsis Protocols, Vol. 82 (1997) J. M. Martinez-Zapater and J. Salinas, eds. (CRC Press).

[0009] Mayer et al (1999) Nature 402(6763):769-77; Sequence and analysis of chromosome 4 of the plant Arabidopsis thaliana. Lin et al. (1999) 402(6763):761-8, “Sequence and analysis of chromosome 2 of the plant Arabidopsis thaliana”. Meinke et al. (1998) Science 282:662-682, “Arabidopsis thaliana”: a model plant for genome analysis. Somerville and Somerville (1999) Science 285:380-383, “Plant functional genomics”. Mozo et al. (1999) Nat. Genet. 22:271-275, “A complete BAC-based physical map of the Arabidopsis thaliana genome”.

### SUMMARY OF THE INVENTION

[0010] Novel nucleic acid sequences of Arabidopsis thaliana, their encoded polypeptides and variants thereof, genes corresponding to these nucleic acids, and proteins expressed by the genes, are provided.

[0011] The invention also provides diagnostic, prophylactic and therapeutic agents employing such novel nucleic acids, their corresponding genes or gene products, including expression constructs, probes, antisense constructs, and the like. The genetic sequences may also be used for the genetic manipulation of plant cells, particularly dicotyledonous plants. The encoded gene products and modified organisms are useful for introducing or improving disease resistance and stress tolerance into plants; screening of biologically active agents, e.g. fungicides, etc.; for elucidating biochemical pathways; and the like.

[0012] In one embodiment of the invention, a nucleic acid is provided that comprises a start codon; an optional intervening sequence; a coding sequence capable of hybridizing under stringent conditions as set forth in SEQ ID NO:1 to 999; and an optional terminal sequence, wherein at least one of said optional sequences is present. Such a nucleic acid may correspond to naturally occurring Arabidopsis expressed sequences.

### DETAILED DESCRIPTION OF THE INVENTION

[0013] Novel nucleic acid sequences from Arabidopsis thaliana, their encoded polypeptides and variants thereof, genes corresponding to these nucleic acids and proteins expressed by the genes are provided. The invention also provides agents employing such novel nucleic acids, their corresponding genes or gene products, including expression constructs, probes, antisense constructs, and the like. The nucleotide sequences are provided in the attached SEQLIST.

[0014] Sequences include, but are not limited to, sequences that encode resistance proteins; sequences that encode tolerance factors; sequences encoding proteins or other factors that are involved, directly or indirectly in biochemical pathways such as metabolic or biosynthetic pathways, sequences involved in signal transduction, sequences involved in the regulation of gene expression, structural genes, and the like. Biosynthetic pathways of interest include, but are not limited to, biosynthetic pathways whose product (which may be an end product or an intermediate) is of commercial, nutritional, or medicinal value.

[0015] The sequences may be used in screening assays of various plant strains to determine the strains that are best capable of withstanding a particular disease or environmental stress. Sequences encoding activators and resistance proteins may be introduced into plants that are deficient in these sequences. Alternatively, the sequences may be introduced under the control of promoters that are convenient for induction of expression. The protein products may be used in screening programs for insecticides, fungicides and antibiotics to determine agents that mimic or enhance the resistance proteins. Such agents may be used in improved methods of treating crops to prevent or treat disease. The protein products may also be used in screening programs to identify agents which mimic or enhance the action of tolerance factors. Such agents may be used in improved methods of treating crops to enhance their tolerance to environmental stresses.

[0016] Still other embodiments of the invention provide methods for enhancing or inhibiting production of a biosynthetic product in a plant by introducing a nucleic acid of the invention into a plant cell, where the nucleic acid comprises sequences encoding a factor which is involved, directly or indirectly in a biosynthetic pathway whose products are of commercial, nutritional, or medicinal value include any factor, usually a protein or peptide, which regulates such a biosynthetic pathway; which is an intermediate in such a biosynthetic pathway; or which in itself is a product that increases the nutritional value of a food product; or which is a medicinal product; or which is any product of commercial value.

[0017] Transgenic plants containing the antisense nucleic acids of the invention are useful for identifying other mediators that may induce expression of proteins of interest; for establishing the extent to which any specific insect and/or pathogen is responsible for damage of a particular plant; for identifying other mediators that may enhance or induce tolerance to environmental stress; for identifying factors involved in biosynthetic pathways of nutritional, commercial, or medicinal value; or for identifying products of nutritional, commercial, or medicinal value.

[0018] In still other embodiments, the invention provides transgenic plants constructed by introducing a subject nucleic acid of the invention into a plant cell, and growing the cell into a callus and then into a plant; or, alternatively by breeding a transgenic plant from the subject process with a second plant to form an F1 or higher hybrid. The subject transgenic plants and progeny are used as crops for their enhanced disease resistance, enhanced traits of interest, for example size or flavor of fruit, length of growth cycle, etc., or for screening programs, e.g. to determine more effective insecticides, etc; used as crops which exhibit enhanced tolerance environmental stress; or used to produce a factor.

[0019] Those skilled in the art will recognize the agricultural advantages inherent in plants constructed to have either increased or decreased expression of resistance proteins; or increased or decreased tolerance to environmental factors; or which produce or over-produce one or more factors involved in a biosynthetic pathway whose product is of commercial, nutritional, or medicinal value. For example, such plants may have increased resistance to attack by predators, insects, pathogens, microorganisms, herbivores, mechanical damage and the like; may be more tolerant to environmental stress, e.g. may be better able to withstand drought conditions, freezing, and the like; or may produce a product not normally made in the plant, or may produce a product in higher than normal amounts, where the product has commercial, nutritional, or medicinal value. Plants which may be useful include dicotyledons and monocotyledons. Representative examples of plants in which the provided sequences may be useful include tomato, potato, tobacco, cotton, soybean, alfalfa, rape, and the like. Monocotyledons, more particularly grasses (Poaceae family) of interest, include, without limitation, Avena sativa (oat); Avena strigosa (black oat); Elymus (wild rye); Hordeum sp. including Hordeum vulgare (barley); Oryza sp., including Oryza glaberrima (African rice); Oryza longistaminata (long-staminate rice); Pennisetum americanum (pearl millet); Sorghum sp. (sorghum); Triticum sp., including Triticum aestivum (common wheat); Triticum durum (durum wheat); Zea mays (corn); etc.

### NUCLEIC ACID COMPOSITIONS

[0020] The following detailed description describes the nucleic acid compositions encompassed by the invention, methods for obtaining cDNA or genomic DNA encoding a full-length gene product, expression of these nucleic acids and genes; identification of structural motifs of the nucleic acids and genes; identification of the function of a gene product encoded by a gene corresponding to a nucleic acid of the invention; use of the provided nucleic acids as probes, in mapping, and in diagnosis; use of the corresponding polypeptides and other gene products to raise antibodies; use of the nucleic acids in genetic modification of plant and other species; and use of the nucleic acids, their encoded gene products, and modified organisms, for screening and diagnostic purposes.

[0021] The scope of the invention with respect to nucleic acid compositions includes, but is not necessarily limited to, nucleic acids having a sequence set forth in any one of SEQ ID NOS:1-999; nucleic acids that hybridize the provided sequences under stringent conditions; genes corresponding to the provided nucleic acids; variants of the provided nucleic acids and their corresponding genes, particularly those variants that retain a biological activity of the encoded gene product.

[0022] In one embodiment, the sequences of the invention provide a polypeptide coding sequence. The polypeptide coding sequence may correspond to a naturally expressed mRNA in Arabidopsis or other species, or may encode a fusion protein between one of the provided sequences and an exogenous protein coding sequence. The coding sequence is characterized by an ATG start codon, a lack of stop codons in-frame with the ATG, and a termination codon, that is, a continuous open frame is provided between the start and the stop codon. The sequence contained between the start and the stop codon will comprise a sequence capable of hybridizing under stringent conditions to a sequence set for in SEQ ID NO:1-999, and may comprise the sequence set forth in the Seqlist.

[0023] Other nucleic acid compositions contemplated by and within the scope of the present invention will be readily apparent to one of ordinary skill in the art when provided with the disclosure here.

[0024] The invention features nucleic acids that are derived from Arabidopsis thaliana. Novel nucleic acid compositions of the invention of particular interest comprise a sequence set forth in any one of SEQ ID NOS:1-999 or an identifying sequence thereof. An identifying sequence is a contiguous sequence of residues at least about 10 nt to about 20 nt in length, usually at least about 50 nt to about 100 nt in length, that uniquely identifies a nucleic acid sequence, e.g., exhibits less than 90%, usually less than about 80% to about 85% sequence identity to any contiguous nucleotide sequence of more than about 20 nt. Thus, the subject novel nucleic acid compositions include full length cDNAs or mRNAs that encompass an identifying sequence of contiguous nucleotides from any one of SEQ ID NOS:1-999.

[0025] The nucleic acids of the invention also include nucleic acids having sequence similarity or sequence identity. Nucleic acids having sequence similarity are detected by hybridization under low stringency conditions, for example, at 50° C. and 10×SSC (0.9 M NaCl/0.09 M sodium citrate) and remain bound when subjected to washing at 55° C. in 1×SSC. Sequence identity can be determined by hybridization under stringent conditions, for example, at 50° C. or higher and 0.1×SSC (9 mM NaCl/0.9 mM sodium citrate). Hybridization methods and conditions are well known in the art, see U.S. Pat. No. 5,707,829. Nucleic acids that are substantially identical to the provided nucleic acid sequences, e.g. allelic variants, genetically altered versions of the gene, etc., bind to the provided nucleic acid sequences (SEQ ID NOS:1-999) under stringent hybridization conditions. By using probes, particularly labeled probes of DNA sequences, one can isolate homologous or related genes. The source of homologous genes can be any species, particularly grasses as previously described.

[0026] Preferably, hybridization is performed using at least 15 contiguous nucleotides of at least one of SEQ ID NOS:1-999. The probe will preferentially hybridize with a nucleic acid or mRNA comprising the complementary sequence, allowing the identification and retrieval of the nucleic acids of the biological material that uniquely hybridize to the selected probe. Probes of more than 15 nucleotides can be used, e.g. probes of from about 18 nucleotides up to the entire length of the provided nucleic acid sequences, but 15 nucleotides generally represents sufficient sequence for unique identification.

[0027] The nucleic acids of the invention also include naturally occurring variants of the nucleotide sequences, e.g. degenerate variants, allelic variants, etc. Variants of the nucleic acids of the invention are identified by hybridization of putative variants with nucleotide sequences disclosed herein, preferably by hybridization under stringent conditions For example, by using appropriate wash conditions, variants of the nucleic acids of the invention can be identified where the allelic variant exhibits at most about 25-30% base pair mismatches relative to the selected nucleic acid probe. In general, allelic variants contain 5-25% base pair mismatches, and can contain as little as even 2-5%, or 1-2% base pair mismatches, as well as a single base-pair mismatch.

[0028] The invention also encompasses homologs corresponding to the nucleic acids of SEQ ID NOS:1-999, where the source of homologous genes can be any related species, usually within the same genus or group. Homologs have substantial sequence similarity, e.g. at least 75% sequence identity, usually at least 90%, more usually at least 95% between nucleotide sequences. Sequence similarity is calculated based on a reference sequence, which may be a subset of a larger sequence, such as a conserved motif, coding region, flanking region, etc. A reference sequence will usually be at least about 18 contiguous nt long, more usually at least about 30 nt long, and may extend to the complete sequence that is being compared. Algorithms for sequence analysis are known in the art, such as BLAST, described in Altschul et al., J. Mol. Biol. (1990) 215:403-10.

[0029] In general, variants of the invention have a sequence identity greater than at least about 65%, preferably at least about 75%, more preferably at least about 85%, and can be greater than at least about 90% or more as determined by the Smith-Waterman homology search algorithm as implemented in MPSRCH program (Oxford Molecular). For the purposes of this invention, a preferred method of calculating percent identity is the Smith-Waterman algorithm, using the following. Global DNA sequence identity must be greater than 65% as determined by the Smith-Waterman homology search algorithm as implemented in MPSRCH program (Oxford Molecular) using an affine gap search with the following search parameters: gap open penalty, 12; and gap extention penalty, 1.

[0030] The subject nucleic acids can be cDNAs or genomic DNAs, as well as fragments thereof, particularly fragments that encode a biologically active gene product and/or are useful in the methods disclosed herein. The term cDNA as used herein is intended to include all nucleic acids that share the arrangement of sequence elements found in native mature mRNA species, where sequence elements are exons and 3′ and 5 ′ non-coding regions. Normally mRNA species have contiguous exons, with the introns, when present, being removed by nuclear RNA splicing, to create a continuous open reading frame encoding a polypeptide of the invention.

[0031] A genomic sequence of interest comprises the nucleic acid present between the initiation codon and the stop codon, as defined in the listed sequences, including all of the introns that are normally present in a native chromosome. It can further include the 3′ and 5′ untranslated regions found in the mature mRNA. It can further include specific transcriptional and translational regulatory sequences, such as promoters, enhancers, etc., including about 1 kb, but possibly more, of flanking genomic DNA at either the 5′ and 3′ end of the transcribed region. The genomic DNA can be isolated as a fragment of 100 kb or smaller; and substantially free of flanking chromosomal sequence. The genomic DNA flanking the coding region, either 3′ and 5′, or internal regulatory sequences as sometimes found in introns, contains sequences required for expression.

[0032] The nucleic acid compositions of the subject invention can encode all or a part of the subject expressed polypeptides. Double or single stranded fragments can be obtained from the DNA sequence by chemically synthesizing oligonucleotides in accordance with conventional methods, by restriction enzyme digestion, by PCR amplification, etc. Isolated nucleic acids and nucleic acid fragments of the invention comprise at least about 15 up to about 100 contiguous nucleotides, or up to the complete sequence provided in SEQ ID NOS:1-999. For the most part, fragments will be of at least 15 nt, usually at least 18 nt or 25 nt, and up to at least about 50 contiguous nt in length or more.

[0033] Probes specific to the nucleic acids of the invention can be generated using the nucleic acid sequences disclosed in SEQ ID NOS:1-999 and the fragments as described above. The probes can be synthesized chemically or can be generated from longer nucleic acids using restriction enzymes. The probes can be labeled, for example, with a radioactive, biotinylated, or fluorescent tag. Preferably, probes are designed based upon an identifying sequence of a nucleic acid of one of SEQ ID NOS:1-999. More preferably, probes are designed based on a contiguous sequence of one of the subject nucleic acids that remain unmasked following application of a masking program for masking low complexity (e.g., XBLAST) to the sequence., i.e. one would select an unmasked region, as indicated by the nucleic acids outside the poly-n stretches of the masked sequence produced by the masking program.

[0034] The nucleic acids of the subject invention are isolated and obtained in substantial purity, generally as other than an intact chromosome. Usually, the nucleic acids, either as DNA or RNA, will be obtained substantially free of other naturally-occurring nucleic acid sequences, generally being at least about 50%, usually at least about 90% pure and are typically recombinant, e.g., flanked by one or more nucleotides with which it is not normally associated on a naturally occurring chromosome.

[0035] The nucleic acids of the invention can be provided as a linear molecule or within a circular molecule. They can be provided within autonomously replicating molecules (vectors) or within molecules without replication sequences. They can be regulated by their own or by other regulatory sequences, as is known in the art. The nucleic acids of the invention can be introduced into suitable host cells using a variety of techniques which are available in the art, such as transferrin polycation-mediated DNA transfer, transfection with naked or encapsulated nucleic acids, liposome-mediated DNA transfer, intracellular transportation of DNA-coated latex beads, protoplast fusion, viral infection, electroporation, gene gun, calcium phosphate-mediated transfection, and the like.

[0036] The subject nucleic acid compositions can be used to, for example, produce polypeptides, as probes for the detection of mRNA of the invention in biological samples, e.g. extracts of cells, to generate additional copies of the nucleic acids, to generate ribozymes or antisense oligonucleotides, and as single stranded DNA probes or as triple-strand forming oligonucleotides. The probes described herein can be used to, for example, determine the presence or absence of the nucleic acid sequences as shown in SEQ ID NOS:1-999 or variants thereof in a sample. These and other uses are described in more detail below.

### USE OF NUCLEIC ACIDS AS CODING SEQUENCES

[0037] Naturally occurring Arabidopsis polypeptides or fragments thereof are encoded by the provided nucleic acids. Methods are known in the art to determine whether the complete native protein is encoded by a candidate nucleic acid sequence. Where the provided sequence encodes a fragment of a polypeptide, methods known in the art may be used to determine the remaining sequence. These approaches may utilize a bioinformatics approach, a cloning approach, extension of mRNA species, etc.

[0038] Substantial genomic sequence is available for Arabidopsis, and may be exploited for determining the complete coding sequence corresponding to the provided sequences. The region of the chromosome to which a given sequence is located may be determined by hybridization or by database searching. The genomic sequence is then searched upstream and downstream for the presence of intron/exon boundaries, and for motifs characteristic of transcriptional start and stop sequences, for example by using Genscan (Burge and Karlin (1997) J. Mol. Biol. 268:78-94); or GRAIL (Uberbacher and Mural (1991) P.N.A.S. 88:11261-1265).

[0039] Alternatively, nucleic acid having a sequence of one of SEQ ID NOS:1-999, or an identifying fragment thereof, is used as a hybridization probe to complementary molecules in a cDNA library using probe design methods, cloning methods, and clone selection techniques as known in the art. Libraries of cDNA are made from selected cells. The cells may be those of A. thaliana, or of related species. In some cases it will be desirable to select cells from a particular stage, e.g. seeds, leaves, infected cells, etc.

[0040] Techniques for producing and probing nucleic acid sequence libraries are described, for example, in Sambrook et al., Molecular Cloning: A Laboratory Manual, 2^{nd} Ed., (1989) Cold Spring Harbor Press, Cold Spring Harbor, N.Y.; and Current Protocols in Molecular Biology, (1987 and updates) Ausubel et al., eds. The cDNA can be prepared by using primers based on sequence from SEQ ID NOS:1-999. In one embodiment, the cDNA library can be made from only poly-adenylated mRNA. Thus, poly-T primers can be used to prepare cDNA from the mRNA.

[0041] Members of the library that are larger than the provided nucleic acids, and preferably that encompass the complete coding sequence of the native message, are obtained. In order to confirm that the entire cDNA has been obtained, RNA protection experiments are performed as follows. Hybridization of a full-length cDNA to an mRNA will protect the RNA from RNase degradation. If the cDNA is not full length, then the portions of the mRNA that are not hybridized will be subject to RNase degradation. This is assayed, as is known in the art, by changes in electrophoretic mobility on polyacrylamide gels, or by detection of released monoribonucleotides. Sambrook et al., Molecular Cloning: A Laboratory Manual, 2^{nd} Ed., (1989) Cold Spring Harbor Press, Cold Spring Harbor, N.Y. In order to obtain additional sequences 5′ to the end of a partial cDNA, 5′ RACE (PCR Protocols: A Guide to Methods and Applications, (1990) Academic Press, Inc.) may be performed.

[0042] Genomic DNA is isolated using the provided nucleic acids in a manner similar to the isolation of full-length cDNAs. Briefly, the provided nucleic acids, or portions thereof, are used as probes to libraries of genomic DNA. Preferably, the library is obtained from the cell type that was used to generate the nucleic acids of the invention, but this is not essential. Such libraries can be in vectors suitable for carrying large segments of a genome, such as P1 or YAC, as described in detail in Sambrook et al., 9.4-9.30. In order to obtain additional 5′ or 3′ sequences, chromosome walking is performed, as described in Sambrook et a/., such that adjacent and overlapping fragments of genomic DNA are isolated. These are mapped and pieced together, as is known in the art, using restriction digestion enzymes and DNA ligase.

[0043] PCR methods may be used to amplify the members of a cDNA library that comprise the desired insert. In this case, the desired insert will contain sequence from the full length cDNA that corresponds to the instant nucleic acids. Such PCR methods include gene trapping and RACE methods. Gene trapping entails inserting a member of a cDNA library into a vector. The vector then is denatured to produce single stranded molecules. Next, a substrate-bound probe, such a biotinylated oligo, is used to trap cDNA inserts of interest. Biotinylated probes can be linked to an avidin-bound solid substrate. PCR methods can be used to amplify the trapped cDNA. To trap sequences corresponding to the full length genes, the labeled probe sequence is based on the nucleic acid sequences of the invention. Random primers or primers specific to the library vector can be used to amplify the trapped cDNA. Such gene trapping techniques are described in Gruber et aL., WO 95/04745 and Gruber et al., U.S. Pat. No. 5,500,356. Kits are commercially available to perform gene trapping experiments from, for example, Life Technologies, Gaithersburg, Md., USA.

[0044] “Rapid amplification of cDNA ends”, or RACE, is a PCR method of amplifying cDNAs from a number of different RNAs. The cDNAs are ligated to an oligonucleotide linker, and amplified by PCR using two primers. One primer is based on sequence from the instant nucleic acids, for which full length sequence is desired, and a second primer comprises sequence that hybridizes to the oligonucleotide linker to amplify the cDNA. A description of this methods is reported in WO 97/19110. A common primer may be designed to anneal to an arbitrary adaptor sequence ligated to cDNA ends. When a single gene-specific RACE primer is paired with the common primer, preferential amplification of sequences between the single gene specific primer and the common primer occurs. Commercial cDNA pools modified for use in RACE are available.

[0045] Once the full-length cDNA or gene is obtained, DNA encoding variants can be prepared by site-directed mutagenesis, described in detail in Sambrook et al., 15.3-15.63. The choice of codon or nucleotide to be replaced can be based on disclosure herein on optional changes in amino acids to achieve altered protein structure and/or function. As an alternative method to obtaining DNA or RNA from a biological material, nucleic acid comprising nucleotides having the sequence of one or more nucleic acids of the invention can be synthesized.

### EXPRESSION OF POLYPEPTIDES

[0046] The provided nucleic acid, e.g. a nucleic acid having a sequence of one of SEQ ID NOS:1-999), the corresponding cDNA, the polypeptide coding sequence as described above, or the full-length gene is used to express a partial or complete gene product. Constructs of nucleic acids having sequences of SEQ ID NOS:1-999 can be generated by recombinant methods, synthetically, or in a single-step assembly of a gene and entire plasmid from large numbers of oligodeoxyribonucleotides is described by, e.g. Stemmer et al., Gene (Amsterdam) (1995) 164(1):49-53.

[0047] Appropriate nucleic acid constructs are purified using standard recombinant DNA techniques as described in, for example, Sambrook et al., Molecular Cloning: A Laboratory Manual, 2^{nd} Ed., (1989) Cold Spring Harbor Press, Cold Spring Harbor, N.Y. The gene product encoded by a nucleic acid of the invention is expressed in any expression system, including, for example, bacterial, yeast, insect, amphibian and mammalian systems.

[0048] The subject nucleic acid molecules are generally propagated by placing the molecule in a vector. Viral and non-viral vectors are used, including plasmids. The choice of plasmid will depend on the type of cell in which propagation is desired and the purpose of propagation. Certain vectors are useful for amplifying and making large amounts of the desired DNA sequence. Other vectors are suitable for expression in cells in culture. Still other vectors are suitable for transfer and expression in cells in a whole organism or person. The choice of appropriate vector is well within the skill of the art. Many such vectors are available commercially.

[0049] The nucleic acids set forth in SEQ ID NOS:1-999 or their corresponding full-length nucleic acids are linked to regulatory sequences as appropriate to obtain the desired expression properties. These can include promoters attached either at the 5′ end of the sense strand or at the 3′ end of the antisense strand, enhancers, terminators, operators, repressors, and inducers. The promoters can be regulated or constitutive. In some situations it may be desirable to use conditionally active promoters, such as tissue-specific or developmental stage-specific promoters. These are linked to the desired nucleotide sequence using the techniques described above for linkage to vectors. Any techniques known in the art can be used.

[0050] When any of the above host cells, or other appropriate host cells or organisms, are used to replicate and/or express the nucleic acids or nucleic acids of the invention, the resulting replicated nucleic acid, RNA, expressed protein or polypeptide, is within the scope of the invention as a product of the host cell or organism. The product is recovered by any appropriate means known in the art.

### IDENTIFICATION OF FUNCTIONAL AND STRUCTURAL MOTIFS

[0051] Translations of the nucleotide sequence of the provided nucleic acids, cDNAs or full genes can be aligned with individual known sequences. Similarity with individual sequences can be used to determine the activity of the polypeptides encoded by the nucleic acids of the invention. Also, sequences exhibiting similarity with more than one individual sequence can exhibit activities that are characteristic of either or both individual sequences.

[0052] The six possible reading frames may be translated using programs such as GCG pepdata, or GCG Frames (Wisconsin Package Version 10.0, Genetics Computer Group (GCG) , Madison, Wis., USA. ). Programs such as ORFFinder (National Center for Biotechnology Information (NCBI) a division of the National Library of Medicine (NLM) at the National Institutes of Health (NIH) http://www.ncbi.nlm.nih.gov/) may be used to identify open reading frames (ORFs) in sequences. ORF finder identifies all possible ORFs in a DNA sequence by locating the standard and alternative stop and start codons. Other ORF identification programs include Genie (Kulp et al. (1996).

[0053] A generalized Hidden Markov Model may be used for the recognition of genes in DNA. (ISMB-96, St. Louis, Mo., AAAI/MIT Press; Reese et al. (1997), “Improved splice site detection in Genie”. Proceedings of the First Annual International Conference on Computational Molecular Biology RECOMB 1997, Santa Fe, N.M., ACM Press, New York., P. 34.); BESTORF—Prediction of potential coding fragment in human or plant EST/mRNA sequence data using Markov Chain Models; and FGENEP—Multiple genes structure prediction in plant genomic DNA (Solovyev et al. (1995) Identification of human gene structure using linear discriminant functions and dynamic programming. In Proceedings of the Third International Conference on Intelligent Systems for Molecular Biology eds. Rawling et al. Cambridge, England, AAAI Press,367-375.; Solovyev et al. (1994) Nucl. Acids Res. 22(24):5156-5163; Solovyev et al,. The prediction of human exons by oligonucleotide composition and discriminant analysis of spliceable open reading frames, in: The Second International conference on Intelligent systems for Molecular Biology (eds. Altman et al.), AAAI Press, Menlo Park, Calif. (1994, 354-362) Solovyev and Lawrence, Prediction of human gene structure using dynamic programming and oligonucleotide composition, In: Abstracts of the 4th annual Keck symposium. Pittsburgh, 47,1993; Burge and Karlin (1997) J. Mol. Biol. 268:78-94; Kulp et al. (1996) Proc. Conf. on Intelligent Systems in Molecular Biology '96, 134-142).

[0054] The full length sequences and fragments of the nucleic acid sequences of the nearest neighbors can be used as probes and primers to identify and isolate the full length sequence corresponding to provided nucleic acids. Typically, a selected nucleic acid is translated in all six frames to determine the best alignment with the individual sequences. These amino acid sequences are referred to, generally, as query sequences, which are aligned with the individual sequences. Suitable databases include Genbank, EMBL, and DNA Database of Japan (DDBJ).

[0055] Query and individual sequences can be aligned using the methods and computer programs described above, and include BLAST, available by ftp at ftp://ncbi.nlm.nih.gov/.

[0056] Gapped BLAST and PSI-BLAST are useful search tools provided by NCBI. (version 2.0) (Altschul et al., 1997). Position-Specific Iterated BLAST (PSI-BLAST) provides an automated, easy-to-use version of a profile search, which is a sensitive way to look for sequence homologues. The program first performs a gapped BLAST database search. The PSI-BLAST program uses the information from any significant alignments returned to construct a position-specific score matrix, which replaces the query sequence for the next round of database searching. PSI-BLAST may be iterated until no new significant alignments are found. The Gapped BLAST algorithm allows gaps (deletions and insertions) to be introduced into the alignments that are returned. Allowing gaps means that similar regions are not broken into several segments. The scoring of these gapped alignments tends to reflect biological relationships more closely. The Smith-Waterman is another algorithm that produces local or global gapped sequence alignments, see Meth. Mol. Biol. (1997) 70: 173-187. Also, the GAP program using the Needleman and Wunsch global alignment method can be utilized for sequence alignments.

[0057] Results of individual and query sequence alignments can be divided into three categories, high similarity, weak similarity, and no similarity. Individual alignment results ranging from high similarity to weak similarity provide a basis for determining polypeptide activity and/or structure. Parameters for categorizing individual results include: percentage of the alignment region length where the strongest alignment is found, percent sequence identity, and e value.

[0058] The percentage of the alignment region length is calculated by counting the number of residues of the individual sequence found in the region of strongest alignment, e.g. contiguous region of the individual sequence that contains the greatest number of residues that are identical to the residues of the corresponding region of the aligned query sequence. This number is divided by the total residue length of the query sequence to calculate a percentage. For example, a query sequence of 20 amino acid residues might be aligned with a 20 amino acid region of an individual sequence. The individual sequence might be identical to amino acid residues 5, 9-15, and 17-19 of the query sequence. The region of strongest alignment is thus the region stretching from residue 9-19, an 11 amino acid stretch. The percentage of the alignment region length is: 11 (length of the region of strongest alignment) divided by (query sequence length) 20 or 55%.

[0059] Percent sequence identity is calculated by counting the number of amino acid matches between the query and individual sequence and dividing total number of matches by the number of residues of the individual sequences found in the region of strongest alignment. Thus, the percent identity in the example above would be 10 matches divided by 11 amino acids, or approximately, 90.9%

[0060] E value is the probability that the alignment was produced by chance. For a single alignment, the e value can be calculated according to Karlin et al., Proc. Natl. Acad. Sci. (1990) 87:2264 and Karlin et al., Proc. Natl. Acad. Sci. (1993) 90. The e value of multiple alignments using the same query sequence can be calculated using an heuristic approach described in Altschul et al., Nat. Genet. (1994) 6:119. Alignment programs such as BLAST program can calculate the e value.

[0061] Another factor to consider for determining identity or similarity is the location of the similarity or identity. Strong local alignment can indicate similarity even if the length of alignment is short. Sequence identity scattered throughout the length of the query sequence also can indicate a similarity between the query and profile sequences. The boundaries of the region where the sequences align can be determined according to Doolittle, supra; BLAST or FASTA programs; or by determining the area where sequence identity is highest.

[0062] In general, in alignment results considered to be of high similarity, the percent of the alignment region length is typically at least about 55% of total length query sequence; more typically, at least about 58%; even more typically; at least about 60% of the total residue length of the query sequence. Usually, percent length of the alignment region can be as much as about 62%; more usually, as much as about 64%; even more usually, as much as about 66%. Further, for high similarity, the region of alignment, typically, exhibits at least about 75% of sequence identity; more typically, at least about 78%; even more typically; at least about 80% sequence identity. Usually, percent sequence identity can be as much as about 82%; more usually, as much as about 84%; even more usually, as much as about 86%.

[0063] The p value is used in conjunction with these methods. The query sequence is considered to have a high similarity with a profile sequence when the p value is less than or equal to 10⁻². Confidence in the degree of similarity between the query sequence and the profile sequence increases as the p value become smaller.

[0064] In general, where alignment results considered to be of weak similarity, there is no minimum percent length of the alignment region nor minimum length of alignment. A better showing of weak similarity is considered when the region of alignment is, typically, at least about 15 amino acid residues in length; more typically, at least about 20; even more typically; at least about 25 amino acid residues in length. Usually, length of the alignment region can be as much as about 30 amino acid residues; more usually, as much as about 40; even more usually, as much as about 60 amino acid residues. Further, for weak similarity, the region of alignment, typically, exhibits at least about 35% of sequence identity; more typically, at least about 40%; even more typically; at least about 45% sequence identity. Usually, percent sequence identity can be as much as about 50%; more usually, as much as about 55%; even more usually, as much as about 60%.

[0065] The query sequence is considered to have a low similarity with a profile sequence when the p value is greater than 10⁻². Confidence in the degree of similarity between the query sequence and the profile sequence decreases as the p values become larger.

[0066] Sequence identity alone can be used to determine similarity of a query sequence to an individual sequence and can indicate the activity of the sequence. Such an alignment, preferably, permits gaps to align sequences. Typically, the query sequence is related to the profile sequence if the sequence identity over the entire query sequence is at least about 15%; more typically, at least about 20%; even more typically, at least about 25%; even more typically, at least about 50%. Sequence identity alone as a measure of similarity is most useful when the query sequence is usually, at least 80 residues in length; more usually, 90 residues; even more usually, at least 95 amino acid residues in length. More typically, similarity can be concluded based on sequence identity alone when the query sequence is preferably 100 residues in length; more preferably, 120 residues in length; even more preferably, 150 amino acid residues in length.

[0067] It is apparent, when studying protein sequence families, that some regions have been better conserved than others during evolution. These regions are generally important for the function of a protein and/or for the maintenance of its three-dimensional structure. By analyzing the constant and variable properties of such groups of similar sequences, it is possible to derive a signature for a protein family or domain, which distinguishes its members from all other unrelated proteins. A pertinent analogy is the use of fingerprints by the police for identification purposes. A fingerprint is generally sufficient to identify a given individual. Similarly, a protein signature can be used to assign a new sequence to a specific family of proteins and thus to formulate hypotheses about its function. The PROSITE database is a compendium of such fingerprints (motifs) and may be used with search software such as Wisconsin GCG Motifs to find motifs or fingerprints in query sequences. PROSITE currently contains signatures specific for about a thousand protein families or domains. Each of these signatures comes with documentation providing background information on the structure and function of these proteins (Hofmann et al. (1999) Nucleic Acids Res. 27:215-219; Bucher and Bairoch., A generalized profile syntax for biomolecular sequences motifs and its function in automatic sequence interpretation (In) ISMB-94; Proceedings 2nd International Conference on Intelligent Systems for Molecular Biology; Altman et al. Eds. (1994), pp 53-61, AAAI Press, Menlo Park).

[0068] Translations of the provided nucleic acids can be aligned with amino acid profiles that define either protein families or common motifs. Also, translations of the provided nucleic acids can be aligned to multiple sequence alignments (MSA) comprising the polypeptide sequences of members of protein families or motifs. Similarity or identity with profile sequences or MSAs can be used to determine the activity of the gene products (e.g., polypeptides) encoded by the provided nucleic acids or corresponding cDNA or genes.

[0069] Profiles can designed manually by (1) creating an MSA, which is an alignment of the amino acid sequence of members that belong to the family and (2) constructing a statistical representation of the alignment. Such methods are described, for example, in Birney et al., Nucl. Acid Res. (1996) 24(14): 2730-2739. MSAs of some protein families and motifs are available for downloading to a local server. For example, the PFAM database with MSAs of 547 different families and motifs, and the software (HMMER) to search the PFAM database may be downloaded from ftp://ftp.genetics.wustl.edu/pub/eddy/pfam-4.4/ to allow secure searches on a local server. Pfam is a database of multiple alignments of protein domains or conserved protein regions., which represent evolutionary conserved structure that has implications for the proteins function (Sonnhammer et al. (1998) Nucl. Acid Res. 26:320-322; Bateman et al. (1999) Nucleic Acids Res. 27:260-262).

[0070] The 3D_ali databank (Pasarella, S. and Argos, P. (1992) Prot. Engineering 5:121-137) was constructed to incorporate new protein structural and sequence data. The databank has proved useful in many research fields such as protein sequence and structure analysis and comparison, protein folding, engineering and design and evolution. The collection enhances present protein structural knowledge by merging information from proteins of similar main-chain fold with homologous primary structures taken from large databases of all known sequences. 3D_ali databank files may be downloaded to a secure local server from http://www.embl-heidelberg.de/argos/ali/ali_form.html.

[0071] The identify and function of the gene that correlates to a nucleic acid described herein can be determined by screening the nucleic acids or their corresponding amino acid sequences against profiles of protein families. Such profiles focus on common structural motifs among proteins of each family. Publicly available profiles are known in the art.

[0072] In comparing a novel nucleic acid with known sequences, several alignment tools are available. Examples include PileUp, which creates a multiple sequence alignment, and is described in Feng et al., J. Mol. Evol. (1987) 25:351. Another method, GAP, uses the alignment method of Needleman et al., J. Mol. Biol. (1970) 48:443. GAP is best suited for global alignment of sequences. A third method, BestFit, functions by inserting gaps to maximize the number of matches using the local homology algorithm of Smith et al. (1981) Adv. Appl. Math. 2:482.

### IDENTIFICATION OF SECRETED & MEMBRANE-BOUND POLYPEPTIDES

[0073] Secreted and membrane-bound polypeptides of the present invention are of interest. Because both secreted and membrane-bound polypeptides comprise a fragment of contiguous hydrophobic amino acids, hydrophobicity predicting algorithms can be used to identify such polypeptides. A signal sequence is usually encoded by both secreted and membrane-bound polypeptide genes to direct a polypeptide to the surface of the cell. The signal sequence usually comprises a stretch of hydrophobic residues. Such signal sequences can fold into helical structures. Membrane-bound polypeptides typically comprise at least one transmembrane region that possesses a stretch of hydrophobic amino acids that can transverse the membrane. Some transmembrane regions also exhibit a helical structure. Hydrophobic fragments within a polypeptide can be identified by using computer algorithms. Such algorithms include Hopp & Woods, Proc. Natl. Acad. Sci. USA (1981) 78:3824-3828; Kyte & Doolittle, J. Mol. Biol. (1982) 157: 105-132; and RAOAR algorithm, Degli Esposti et al., Eur. J. Biochem. (1990) 190: 207-219.

[0074] Another method of identifying secreted and membrane-bound polypeptides is to translate the nucleic acids of the invention in all six frames and determine if at least 8 contiguous hydrophobic amino acids are present. Those translated polypeptides with at least 8; more typically, 10; even more typically, 12 contiguous hydrophobic amino acids are considered to be either a putative secreted or membrane bound polypeptide. Hydrophobic amino acids include alanine, glycine, histidine, isoleucine, leucine, lysine, methionine, phenylalanine, proline, threonine, tryptophan, tyrosine, and valine.

### IDENTIFICATION OF THE FUNCTION OF AN EXPRESSION PRODUCT

[0075] The biological function of the encoded gene product of the invention may be determined by empirical or deductive methods. One promising avenue, termed phylogenomics, exploits the use of evolutionary information to facilitate assignment of gene function. The approach is based on the idea that functional predictions can be greatly improved by focusing on how genes became similar in sequence during evolution instead of focusing on the sequence similarity itself. One of the major efficiencies that has emerged from plant genome research to date is that a large percentage of higher plant genes can be assigned some degree of function by comparing them with the sequences of genes of known function.

[0076] Alternatively, reverse genetics is used to identify gene function. Large collections of insertion mutants are available for Arabidopsis, maize, petunia, and snapdragon. These collections can be screened for an insertional inactivation of any gene by using the polymerase chain reaction (PCR) primed with oligonucleotides based on the sequences of the target gene and the insertional mutagen. The presence of an insertion in the target gene is indicated by the presence of a PCR product. By multiplexing DNA samples, hundreds of thousands of lines can be screened and the corresponding mutant plants can be identified with relatively small effort. Analysis of the phenotype and other properties of the corresponding mutant will provide an insight into the function of the gene.

[0077] In one method of the invention, the gene function in a transgenic Arabidopsis plant is assessed with anti-sense constructs. A high degree of gene duplication is apparent in Arabidopsis, and many of the gene duplications in Arabidopsis are very tightly linked. Large numbers of transgenic Arabidopsis plants can be generated by infecting flowers with Agrobacterium tumefaciens containing an insertional mutagen, a method of gene silencing based on producing double-stranded RNA from bidirectional transcription of genes in transgenic plants can be broadly useful for high-throughput gene inactivation (Clough and Bent (1999) Plant J. 17; Waterhouse et al. (1998) Proc. Natl. Acad. Sci. U.S.A. 95:13959). This method may use promoters that are expressed in only a few cell types or at a particular developmental stage or in response to an external stimulus. This could significantly obviate problems associated with the lethality of some mutations.

[0078] Virus-induced gene silencing may also find use for suppressing gene function. This method exploits the fact that some or all plants have a surveillance system that can specifically recognize viral nucleic acids and mount a sequence-specific suppression of viral RNA accumulation. By inoculating plants with a recombinant virus containing part of a plant gene, it is possible to rapidly silence the endogenous plant gene.

[0079] Antisense nucleic acids are designed to specifically bind to RNA, resulting in the formation of RNA-DNA or RNA-RNA hybrids, with an arrest of DNA replication, reverse transcription or messenger RNA translation. Antisense nucleic acids based on a selected nucleic acid sequence can interfere with expression of the corresponding gene. Antisense nucleic acids are typically generated within the cell by expression from antisense constructs that contain the antisense strand as the transcribed strand. Antisense nucleic acids based on the disclosed nucleic acids will bind and/or interfere with the translation of mRNA comprising a sequence complementary to the antisense nucleic acid. The expression products of control cells and cells treated with the antisense construct are compared to detect the protein product of the gene corresponding to the nucleic acid upon which the antisense construct is based. The protein is isolated and identified using routine biochemical methods.

[0080] As an alternative method for identifying function of the gene corresponding to a nucleic acid disclosed herein, dominant negative mutations are readily generated for corresponding proteins that are active as homomultimers. A mutant polypeptide will interact with wild-type polypeptides (made from the other allele) and form a non-functional multimer. Thus, a mutation is in a substrate-binding domain, a catalytic domain, or a cellular localization domain. Preferably, the mutant polypeptide will be overproduced. Point mutations are made that have such an effect. In addition, fusion of different polypeptides of various lengths to the terminus of a protein can yield dominant negative mutants. General strategies are available for making dominant negative mutants (see for example, Herskowitz (1987) Nature 329:219). Such techniques can be used to create loss of function mutations, which are useful for determining protein function.

[0081] Another approach for discovering the function of genes utilizes gene chips and microarrays. DNA sequences representing all the genes in an organism can be placed on miniature solid supports and used as hybridization substrates to quantitate the expression of all the genes represented in a complex mRNA sample. This information is used to provide extensive databases of quantitative information about the degree to which each gene responds to pathogens, pests, drought, cold, salt, photoperiod, and other environmental variation. Similarly, one obtains extensive information about which genes respond to changes in developmental processes such as germination and flowering. One can therefore determine which genes respond to the phytohormones, growth regulators, safeners, herbicides, and related agrichemicals. These databases of gene expression information provide insights into the “pathways” of genes that control complex responses. The accumulation of DNA microarray or gene chip data from many different experiments creates a powerful opportunity to assign functional information to genes of otherwise unknown function. The conceptual basis of the approach is that genes that contribute to the same biological process will exhibit similar patterns of expression. Thus, by clustering genes based on the similarity of their relative levels of expression in response to diverse stimuli or developmental or environmental conditions, it is possible to assign functions to many genes based on the known function of other genes in the cluster.

### CONSTRUCTION OF POLYPEPTIDES OF THE INVENTION AND VARIANTS THEREOF

[0082] The polypeptides of the invention include those encoded by the disclosed nucleic acids. These polypeptides can also be encoded by nucleic acids that, by virtue of the degeneracy of the genetic code, are not identical in sequence to the disclosed nucleic acids. Thus, the invention includes within its scope a polypeptide encoded by a nucleic acid having the sequence of any one of SEQ ID NOS: 1-999 or a variant thereof.

[0083] In general, the term “polypeptide” as used herein refers to both the full length polypeptide encoded by the recited nucleic acid, the polypeptide encoded by the gene represented by the recited nucleic acid, as well as portions or fragments thereof. Polypeptides also includes variants of the naturally occurring proteins, where such variants are homologous or substantially similar to the naturally occurring protein, and can be of an origin of the same or different species as the naturally occurring protein. In general, variant polypeptides have a sequence that has at least about 80%, usually at least about 90%, and more usually at least about 98% sequence identity with a differentially expressed polypeptide of the invention, as measured by BLAST using the parameters described above. The variant polypeptides can be naturally or non-naturally glycosylated, i.e., the polypeptide has a glycosylation pattern that differs from the glycosylation pattern found in the corresponding naturally occurring protein.

[0084] In general, the polypeptides of the subject invention are provided in a non-naturally occurring environment, e.g. are separated from their naturally occurring environment. In certain embodiments, the subject protein is present in a composition that is enriched for the protein as compared to a control. As such, purified polypeptide is provided, where by purified is meant that the protein is present in a composition that is substantially free of non-differentially expressed polypeptides, where by substantially free is meant that less than 90%, usually less than 60% and more usually less than 50% of the composition is made up of non-differentially expressed polypeptides.

[0085] Also within the scope of the invention are variants; variants of polypeptides include mutants, fragments, and fusions. Mutants can include amino acid substitutions, additions or deletions. The amino acid substitutions can be conservative amino acid substitutions or substitutions to eliminate non-essential amino acids, such as to alter a glycosylation site, a phosphorylation site or an acetylation site, or to minimize misfolding by substitution or deletion of one or more cysteine residues that are not necessary for function. Conservative amino acid substitutions are those that preserve the general charge, hydrophobicity/hydrophilicity, and/or steric bulk of the amino acid substituted.

[0086] Variants also include fragments of the polypeptides disclosed herein, particularly biologically active fragments and/or fragments corresponding to functional domains. Fragments of interest will typically be at least about 10 amino acids (aa) to at least about 15 aa in length, usually at least about 50 aa in length, and can be as long as 300 aa in length or longer, but will usually not exceed about 1000 aa in length, where the fragment will have a stretch of amino acids that is identical to a polypeptide encoded by a nucleic acid having a sequence of any SEQ ID NOS:1-999, or a homolog thereof.

[0087] The protein variants described herein are encoded by nucleic acids that are within the scope of the invention. The genetic code can be used to select the appropriate codons to construct the corresponding variants.

### LIBRARIES AND ARRAYS

[0088] In general, a library of biopolymers is a collection of sequence information, which information is provided in either biochemical form (e.g., as a collection of nucleic acid or polypeptide molecules), or in electronic form (e.g., as a collection of genetic sequences stored in a computer-readable form, as in a computer system and/or as part of a computer program). The term biopolymer, as used herein, is intended to refer to polypeptides, nucleic acids, and derivatives thereof, which molecules are characterized by the possession of genetic sequences either corresponding to, or encoded by, the sequences set forth in the provided sequence list (seqlist). The sequence information can be used in a variety of ways, e.g., as a resource for gene discovery, as a representation of sequences expressed in a selected cell type, e.g. cell type markers, etc.

[0089] The nucleic acid libraries of the subject invention include sequence information of a plurality of nucleic acid sequences, where at least one of the nucleic acids has a sequence of any of SEQ ID NOS:1-999. By plurality is meant one or more, usually at least 2 and can include up to all of SEQ ID NOS:1-999. The length and number of nucleic acids in the library will vary with the nature of the library, e.g., if the library is an oligonucleotide array, a cDNA array, a computer database of the sequence information, etc.

[0090] Where the library is an electronic library, the nucleic acid sequence information can be present in a variety of media. “Media” refers to a manufacture, other than an isolated nucleic acid molecule, that contains the sequence information of the present invention. Such a manufacture provides the sequences or a subset thereof in a form that can be examined by means not directly applicable to the sequence as it exists in a nucleic acid. For example, the nucleotide sequence of the present invention, e.g. the nucleic acid sequences of any of the nucleic acids of SEQ ID NOS:1-999, can be recorded on computer readable media, e.g. any medium that can be read and accessed directly by a computer. Such media include, but are not limited to: magnetic storage media, such as a floppy disc, a hard disc storage medium, and a magnetic tape; optical storage media such as CD-ROM; electrical storage media such as RAM and ROM; and hybrids of these categories such as magnetic/optical storage media. One of skill in the art can readily appreciate how any of the presently known computer readable mediums can be used to create a manufacture comprising a recording of the present sequence information. “Recorded” refers to a process for storing information on computer readable medium, using any such methods as known in the art. Any convenient data storage structure can be chosen, based on the means used to access the stored information. A variety of data processor programs and formats can be used for storage, e.g. word processing text file, database format, etc. In addition to the sequence information, electronic versions of the libraries of the invention can be provided in conjunction or connection with other computer-readable information and/or other types of computer-readable files (e.g., searchable files, executable files, etc, including, but not limited to, for example, search program software, etc.) By providing the nucleotide sequence in computer readable form, the information can be accessed for a variety of purposes. Computer software to access sequence information is publicly available. For example, the BLAST (Altschul et al., supra.) and BLAZE (Brutlag et al. Comp. Chem. (1993) 17:203) search algorithms on a Sybase system can be used identify open reading frames (ORFs) within the genome that contain homology to ORFs from other organisms.

[0091] As used herein, a “computer-based system” refers to the hardware means, software means, and data storage means used to analyze the nucleotide sequence information of the present invention. The minimum hardware of the computer-based systems of the present invention comprises a central processing unit (CPU), input means, output means, and data storage means. A skilled artisan can readily appreciate that any one of the currently available computer-based system are suitable for use in the present invention. The data storage means can comprise any manufacture comprising a recording of the present sequence information as described above, or a memory access means that can access such a manufacture. “Search means” refers to one or more programs implemented on the computer-based system, to compare a target sequence or target structural motif with the stored sequence information. Search means are used to identify fragments or regions of the genome that match a particular target sequence or target motif. A variety of known algorithms are publicly known and commercially available, e.g. MacPattern (EMBL), BLASTN, BLASTX (NCBI) and tBLASTX. A target sequence can be any DNA or amino acid sequence of six or more nucleotides or two or more amino acids, preferably from about 10 to 100 amino acids or from about 30 to 300 nucleotide residues.

[0092] A “target structural motif”, or “target motif”, refers to any rationally selected sequence or combination of sequences in which the sequence(s) are chosen based on a three-dimensional configuration that is formed upon the folding of the target motif, or on consensus sequences of regulatory or active sites. There are a variety of target motifs known in the art. Protein target motifs include, but arc not limited to, enzyme active sites and signal sequences. Nucleic acid target motifs include, but are not limited to, hairpin structures, promoter sequences and other expression elements such as binding sites for transcription factors.

[0093] A variety of structural formats for the input and output means can be used to input and output the information in the computer-based systems of the present invention. One format for an output means ranks fragments of the genome possessing varying degrees of homology to a target sequence or target motif. Such presentation provides a skilled artisan with a ranking of sequences and identifies the degree of sequence similarity contained in the identified fragment.

[0094] A variety of comparing means can be used to compare a target sequence or target motif with the data storage means to identify sequence fragments of the genome. A skilled artisan can readily recognize that any one of the publicly available homology search programs can be used as the search means for the computer based systems of the present invention.

[0095] As discussed above, the “library” of the invention also encompasses biochemical libraries of the nucleic acids of SEQ ID NOS:1-999, e.g., collections of nucleic acids representing the provided nucleic acids. The biochemical libraries can take a variety of forms, e.g. a solution of cDNAs, a pattern of probe nucleic acids stably bound to a surface of a solid support (microarray) and the like. By array is meant an article of manufacture that has a solid support or substrate with one or more nucleic acid targets on one of its surfaces, where the number of distinct nucleic may be in the hundreds, thousand, or tens of thousands. Each nucleic acid will comprise at 18 nt and often at least 25 nt, and often at least 100 to 1000 nucleotides, and may represent up to a complete coding sequence or cDNA.. A variety of different array formats have been developed and are known to those of skill in the art. The arrays of the subject invention find use in a variety of applications, including gene expression analysis, drug screening, mutation analysis and the like, as disclosed in the above-listed exemplary patent documents.

[0096] In addition to the above nucleic acid libraries, analogous libraries of polypeptides are also provided, where the where the polypeptides of the library will represent at least a portion of the polypeptides encoded by SEQ ID NOS:1-999.

### GENETICALLY ALTERED CELLS AND TRANSGENICS

[0097] The subject nucleic acids can be used to create genetically modified and transgenic organisms, usually plant cells and plants, which may be monocots or dicots. The term transgenic, as used herein, is defined as an organism into which an exogenous nucleic acid construct has been introduced, generally the exogenous sequences are stably maintained in the genome of the organism. Of particular interest are transgenic organisms where the genomic sequence of germ line cells has been stably altered by introduction of an exogenous construct.

[0098] Typically, the transgenic organism is altered in the genetic expression of the introduced nucleotide sequences as compared to the wild-type, or unaltered organism. For example, constructs that provide for over-expression of a targeted sequence, sometimes referred to as a knock-in, provide for increased levels of the gene product. Alternatively, expression of the targeted sequence can be down-regulated or substantially eliminated by introduction of a knock-out construct, which may direct transcription of an anti-sense RNA that blocks expression of the naturally occurring mRNA, by deletion of the genomic copy of the targeted sequence, etc.

[0099] In one method, large numbers of genes are simultaneously introduced in order to explore the genetic basis of complex traits, for example by making plant artificial chromosome (PLAC) libraries. The centromeres in Arabidopsis have been mapped and current genome sequencing efforts will extend through these regions. Because Arabidopsis telomeres are very similar to those in yeast one may use a hybrid sequence of alternating plant and yeast sequences that function in both types of organisms, developing yeast artificial chromosome-PLAC libraries, and then introducing them into a suitable plant host to evaluate the phenotypic consequences. By providing a defined chromosomal environment for cloned genes, the use of PLACs may also enhance the ability to produce transgenic plants with defined levels of gene expression.

[0100] It has been found in many organisms that there is significant redundancy in the representation of genes in a genome. That is, a particular gene function is likely by represented by multiple copies of similar coding sequences in the genome. These copies are typically conserved in the amino acid sequence, but may diverge in the sequence of non-translated sequences, and in their codon usage. In order to knock out a particular genetic function in an organism, it may not be sufficient to delete a genomic copy of a single gene. In such cases it may be preferable to achieve a genetic knock-out with an anti-sense construct, particularly where the sequence is aligned with the coding portion of the mRNA.

[0101] Methods of transforming plant cells are well-known in the art, and include protoplast transformation, tungsten whiskers (Coffee et al., U.S. Pat. No. 5,302,523, issued Apr. 12, 1994), directly by microorganisms with infectious plasmids, use of transposons (U.S. Pat. No. 5,792,294), infectious viruses, the use of liposomes, microinjection by mechanical or laser beam methods, by whole chromosomes or chromosome fragments, electroporation, silicon carbide fibers, and microprojectile bombardment.

[0102] For example, one may utilize the biolistic bombardment of meristem tissue, at a very early stage of development, and the selective enhancement of transgenic sectors toward genetic homogeneity, in cell layers that contribute to germline transmission. Biolistics-mediated production of fertile, transgenic maize is described in Gordon-Kamm et al. (1990), Plant Cell 2:603; Fromm et al. (1990) Bio/Technology 8: 833, for example. Alternatively, one may use a microorganism, including but not limited to, Agrobacterium tumefaciens as a vector for transforming the cells, particularly where the targeted plant is a dicotyledonous species. See, for example, U.S. Pat. No. 5,635,381. Leung et al. (1990) Curr. Genet. 17(5):409-11 describe integrative transformation of three fertile hermaphroditic strains of Arabidopsis thaliana using plasmids and cosmids that contain an E. coli gene linked to Aspergillus nidulans regulatory sequences.

[0103] Preferred expression cassettes for cereals may include promoters that are known to express exogenous DNAs in corn cells. For example, the Adhl promoter has been shown to be strongly expressed in callus tissue, root tips, and developing kernels in corn. Promoters that are used to express genes in corn include, but are not limited to, a plant promoter such as the, CaMV 35S promoter (Odell et al., Nature, 313, 810 (1985)), or others such as CaMV 19S (Lawton et al., Plant Mol. Biol., 9, 31F (1987)), nos (Ebert et al., PNAS USA, 84, 5745 (1987)), Adh (Walker et al., PNAS USA, 84, 6624 (1987)), sucrose synthase (Yang et al., PNAS USA, 87, 4144 (1990)), .alpha.-tubulin, ubiquitin, actin (Wang et al., Mol. Cell. Biol., 12, 3399 (1992)), cab (Sullivan et al., Mol. Gen. Genet, 215, 431 (1989)), PEPCase (Hudspeth et al., Plant Mol. Biol., 12, 579 (1989)), or those associated with the R gene complex (Chandler et al., The Plant Cell, 1, 1175 (1989)). Other promoters useful in the practice of the invention are known to those of skill in the art.

[0104] Tissue-specific promoters, including but not limited to, root-cell promoters (Conkling et al., Plant Physiol., 93, 1203 (1990)), and tissue-specific enhancers (Fromm et al., The Plant Cell, 1, 977 (1989)) are also contemplated to be particularly useful, as are inducible promoters such as water-stress-, ABA- and turgor-inducible promoters (Guerrero et al., Plant Molecular Biology, 15, 11-26)), and the like.

[0105] Regulating and/or limiting the expression in specific tissues may be functionally accomplished by introducing a constitutively expressed gene (all tissues) in combination with an antisense gene that is expressed only in those tissues where the gene product is not desired. Expression of an antisense transcript of this preselected DNA segment in an rice grain, using, for example, a zein promoter, would prevent accumulation of the gene product in seed. Hence the protein encoded by the preselected DNA would be present in all tissues except the kernel.

[0106] Alternatively, one may wish to obtain novel tissue-specific promoter sequences for use in accordance with the present invention. To achieve this, one may first isolate cDNA clones from the tissue concerned and identify those clones which are expressed specifically in that tissue, for example, using Northern blotting or DNA microarrays. Ideally, one would like to identify a gene that is not present in a high copy number, but which gene product is relatively abundant in specific tissues. The promoter and control elements of corresponding genomic clones may then be localized using the techniques of molecular biology known to those of skill in the art. Alternatively, promoter elements can be identified using enhancer traps based on T-DNA and/or transposon vector systems (see, for example, Campisi et al. (1999) Plant J. 17:699-707; Gu et al. (1998) Development 125:1509-1517).

[0107] In some embodiments of the present invention expression of a DNA segment in a transgenic plant will occur only in a certain time period during the development of the plant. Developmental timing is frequently correlated with tissue specific gene expression. For example, in corn expression of zein storage proteins is initiated in the endosperm about 15 days after pollination.

[0108] Ultimately, the most desirable DNA segments for introduction into a plant genome may be homologous genes or gene families which encode a desired trait (e.g., increased disease resistance) and which are introduced under the control of novel promoters or enhancers, etc., or perhaps even homologous or tissue-specific (e.g., root-, grain- or leaf-specific) promoters or control elements.

[0109] The genetically modified cells are screened for the presence of the introduced genetic material. The cells may be used in functional studies, drug screening, etc., e.g. to study chemical mode of action, to determine the effect of a candidate agent on pathogen growth, infection of plant cells, etc.

[0110] The modified cells are useful in the study of genetic function and regulation, for alteration of the cellular metabolism, and for screening compounds that may affect the biological function of the gene or gene product. For example, a series of small deletions and/or substitutions may be made in the hosts native gene to determine the role of different domains and motifs in the biological function. Specific constructs of interest include anti-sense, as previously described, which will reduce or abolish expression, expression of dominant negative mutations, and over-expression of genes.

[0111] Where a sequence is introduced, the introduced sequence may be either a complete or partial sequence of a gene native to the host, or may be a complete or partial sequence that is exogenous to the host organism, e.g., an A. thaliana sequence inserted into wheat plants. A detectable marker, such as aldA, lac Z, etc. may be introduced into the locus of interest, where upregulation of expression will result in an easily detected change in phenotype.

[0112] One may also provide for expression of the gene or variants thereof in cells or tissues where it is not normally expressed, at levels not normally present in such cells or tissues, or at abnormal times of development, during sporulation, etc. By providing expression of the protein in cells in which it is not normally produced, one can induce changes in cell behavior.

[0113] DNA constructs for homologous recombination will comprise at least a portion of the provided gene or of a gene native to the species of the host organism, wherein the gene has the desired genetic modification(s), and includes regions of homology to the target locus (see Kempin et al. (1997) Nature 389:802-803). DNA constructs for random integration or episomal maintenance need not include regions of homology to mediate recombination. Conveniently, markers for positive and negative selection are included. Methods for generating cells having targeted gene modifications through homologous recombination are known in the art.

[0114] Embodiments of the invention provide processes for enhancing or inhibiting synthesis of a protein in a plant by introducing a provided nucleic acids sequence into a plant cell, where the nucleic acid comprises sequences encoding a protein of interest. For example, enhanced resistance to pathogens may be achieved by inserting a nucleic acid encoding an activator in a vector downstream from a promoter sequence capable of driving constitutive high-level expression in a plant cell. When grown into plants, the transgenic plants exhibit increased synthesis of resistance proteins, and increased resistance to pathogens.

[0115] Other embodiments of the invention provide processes for enhancing or inhibiting synthesis of a tolerance factor in a plant by introducing a nucleic acid of the invention into a plant cell, where the nucleic acid comprises sequences encoding a tolerance factor. For example, enhanced tolerance to an environmental stress may be achieved by inserting a nucleic acid encoding an activator in a vector downstream from a promoter sequence capable of driving constitutive high-level expression in a plant cell. When grown into plants, the transgenic plants exhibit increased synthesis of tolerance proteins, and increased tolerance to environmental stress.

[0116] Factors which are involved, directly or indirectly in biosynthetic pathways whose products are of commercial, nutritional, or medicinal value include any factor, usually a protein or peptide, which regulates such a biosynthetic pathway (e.g., an activator or repressor); which is an intermediate in such a biosynthetic pathway; or which is a product that increases the nutritional value of a food product; a medicinal product; or any product of commercial value and/or research interest. Plant and other cells may be genetically modified to enhance a trait of interest, by upregulating or down-regulating factors in a biosynthetic pathway.

### SCREENING ASSAYS

[0117] The polypeptides encoded by the provided nucleic acid sequences, and cells genetically altered to express such sequences, are useful in a variety of screening assays to determine effect of candidate inhibitors, activators., or modifiers of the gene product. One may determine what insecticides, fungicides and the like have an enhancing or synergistic activity with a gene. Alternatively, one may screen for compounds that mimic the activity of the protein. Similarly, the effect of activating agents may be used to screen for compounds that mimic or enhance the activation of proteins. Candidate inhibitors of a particular gene product are screened by detecting decreased from the targeted gene product.

[0118] The screening assays may use purified target macromolecules to screen large compound libraries for inhibitory drugs; or the purified target molecule may be used for a rational drug design program, which requires first determining the structure of the macromolecular target or the structure of the macromolecular target in association with its customary substrate or ligand. This information is then used to design compounds which must be synthesized and tested further. Test results are used to refine the molecular models and drug design process in an iterative fashion until a lead compound emerges.

[0119] Drug screening may be performed using an in vitro model, a genetically altered cell, or purified protein. One can identify ligands or substrates that bind to, modulate or mimic the action of the target genetic sequence or its product. A wide variety of assays may be used for this purpose, including labeled in vitro protein-protein binding assays, electrophoretic mobility shift assays, immunoassays for protein binding, and the like. The purified protein may also be used for determination of three-dimensional crystal structure, which can be used for modeling intermolecular interactions.

[0120] Where the nucleic acid encodes a factor involved in a biosynthetic pathway, as described above, it may be desirable to identify factors, e.g., protein factors, which interact with such factors. One can identify interacting factors, ligands, substrates that bind to, modulate or mimic the action of the target genetic sequence or its product. A wide variety of assays may be used for this purpose, including labeled in vitro protein-protein binding assays, electrophoretic mobility shift assays, immunoassays for protein binding, and the like. In vivo assays for protein-protein interactions in E. coli and yeast cells are also well-established (see Hu et al. (2000) Methods 20:80-94; and Bai and Elledge (1997) Methods Enzymol. 283:141-156).

[0121] The purified protein may also be used for determination of three-dimensional crystal structure, which can be used for modeling intermolecular interactions. It may also be of interest to identify agents that modulate the interaction of a factor identified as described above with a factor encoded by a nucleic acid of the invention. Drug screening can be performed to identify such agents. For example, a labeled in vitro protein-protein binding assay can be used, which is conducted in the presence and absence of an agent being tested.

[0122] The term agent as used herein describes any molecule, e.g. protein or pharmaceutical, with the capability of altering or mimicking a physiological function. Generally a plurality of assay mixtures are run in parallel with different agent concentrations to obtain a differential response to the various concentrations. Typically, one of these concentrations serves as a negative control, i.e. at zero concentration or below the level of detection.

[0123] Candidate agents encompass numerous chemical classes, though typically they are organic molecules, preferably small organic compounds having a molecular weight of more than 50 and less than about 2,500 daltons. Candidate agents comprise functional groups necessary for structural interaction with proteins, particularly hydrogen bonding, and typically include at least an amine, carbonyl, hydroxyl or carboxyl group, preferably at least two of the functional chemical groups. The candidate agents often comprise cyclical carbon or heterocyclic structures and/or aromatic or polyaromatic structures substituted with one or more of the above functional groups. Candidate agents are also found among biomolecules including peptides, saccharides, fatty acids, steroids, purines, pyrimidines, derivatives, structural analogs or combinations thereof.

[0124] Candidate agents are obtained from a wide variety of sources including libraries of synthetic or natural compounds. For example, numerous means are available for random and directed synthesis of a wide variety of organic compounds and biomolecules, including expression of randomized oligonucleotides and oligopeptides. Alternatively, libraries of natural compounds in the form of bacterial, fungal, plant and organism extracts are available or readily produced. Additionally, natural or synthetically produced libraries and compounds are readily modified through conventional chemical, physical and biochemical means, and may be used to produce combinatorial libraries. Known pharmacological agents may be subjected to directed or random chemical modifications, such as acylation, alkylation, esterification, amidification, etc. to produce structural analogs.

[0125] Where the screening assay is a binding assay, one or more of the molecules may be joined to a label, where the label can directly or indirectly provide a detectable signal. Various labels include radioisotopes, fluorescers, chemiluminescers, enzymes, specific binding molecules, particles, e.g. magnetic particles, and the like. Specific binding molecules include pairs, such as biotin and streptavidin, digoxin and antidigoxin etc. For the specific binding members, the complementary member would normally be labeled with a molecule that provides for detection, in accordance with known procedures.

[0126] A variety of other reagents may be included in the screening assay. These include reagents like salts, neutral proteins, e.g. albumin, detergents, etc that are used to facilitate optimal protein-protein binding and/or reduce non-specific or background interactions. Reagents that improve the efficiency of the assay, such as protease inhibitors, nuclease inhibitors, anti-microbial agents, etc. may be used. The mixture of components are added in any order that provides for the requisite binding. Incubations are performed at any suitable temperature, typically between 4 and 40° C. Incubation periods are selected for optimum activity, but may also be optimized to facilitate rapid high-throughput screening. Typically between 0.1 and 1 hours will be sufficient.

[0127] The compounds having the desired biological activity may be administered in an acceptable carrier to a host. The active agents may be administered in a variety of ways. Depending upon the manner of introduction, the compounds may be formulated in a variety of ways. The concentration of therapeutically active compound in the formulation may vary from about 0.01-100 wt. %.

[0128] It must be noted that as used herein and in the appended claims, the singular forms “a”, “and”, and “the” include plural referents unless the context clearly dictates otherwise. Thus, for example, reference to “a complex” includes a plurality of such complexes and reference to the formulation includes reference to one or more formulations and equivalents thereof known to those skilled in the art, and so forth.

[0129] Unless defined otherwise, all technical and scientific terms used herein have the same meaning as commonly understood to one of ordinary skill in the art to which this invention belongs. Although any methods, devices and materials similar or equivalent to those described herein can be used in the practice or testing of the invention, the preferred methods, devices and materials are now described.

[0130] All publications mentioned herein are incorporated herein by reference for the purpose of describing and disclosing, for example, the methods and methodologies that are described in the publications which might be used in connection with the presently described invention. The publications discussed above and throughout the text are provided solely for their disclosure prior to the filing date of the present application. Nothing herein is to be construed as an admission that the inventors are not entitled to antedate such disclosure by virtue of prior invention.

[0131] The following examples are put forth so as to provide those of ordinary skill in the art with a complete disclosure and description of how to make and use the subject invention, and are not intended to limit the scope of what is regarded as the invention. Efforts have been made to ensure accuracy with respect to the numbers used (e.g. amounts, temperature, concentrations, etc.) but some experimental errors and deviations should be allowed for. Unless otherwise indicated, parts are parts by weight, molecular weight is average molecular weight, temperature is in degrees Celsius, and pressure is at or near atmospheric.

### EXPERIMENTAL

### Cloning and Characterization of Arabidopsis thaliana Genes.

[0132] Following DNA isolation, sequencing was performed using the Dye Primer Sequencing protocol, below. The sequencing reactions were loaded by hand onto a 48 lane ABI 377 and run on a 36 cm gel with the 36E-2400 run module and extraction. Gel analysis was performed with ABI software.

[0133] The Phred program was used to read the sequence trace from the ABI sequencer, call the bases and produce a sequence read and a quality score for each base call in the sequence., (Ewing et al. (1998) Genome Research 8:175-185; Ewing and Green (1998) Genome Research 8:186-194.) PolyPhred may be used to detect single nucleotide polymorphisms in sequences (Kwok et al. (1994) Genomics 25:615-622; Nickerson et al. (1997) Nucleic Acids Research 25(14):2745-2751.)

[0134] MicroWave Plasmid Protocol:

[0135] Fill Beckman 96 deep-well growth blocks with 1 ml of TB containing 50 μg of ampicillin per ml. Inoculate each well with a colony picked with a toothpick or a 96-pin tool from a glycerol stock plate. Cover the blocks with a plastic lid and tape at two ends to hold lid in place. Incubate overnight (16-24 hours depending on the host stain) at 37° C. with shaking at 275 rpm in a New Brunswick platform shaker. Pellet cells by centrifugation for 20 minutes at 3250 rpm in a Beckman GS-R6K, decant TB and freeze pelleted cell in the 96 well block. Thaw blocks on the bench when ready to continue.

Prepare the MW-Tween20 solution

| For four blocks: | For 16 blocks: |
|---|---|
| 50 ml STET/TWEEN20 | 200 ml STET/TWEEN |
| 2 tubes RNAse (10 mg/ml, 600 ulea) | 8 tubes RNAse |
| 1 tube lysozyme (25 mg) | 4 tubes lysozyme |

[0136] Pipette RNAse and Lysozyme into the corner of a beaker. Add Tween 20 solution and swirl to mix completely. Use the Multidrop (or Biohit) to add 25 ul of sterile H₂O (from the L size autoclaved bottles) to each well. Resuspend the pellets by vortexing on setting 10 of the platform vortexer. Check pellets after 4 min. and repeat as necessary to resuspend completely. Use the multidrop to add 70 μl of the freshly prepared MW-Tween 20 solution to each well. Vortex at setting 6 on the platform vortex for 15 seconds. Do not cause frothing.

[0137] Incubate the blocks at room temperature for 5 min. Place two blocks at a time in the microwave (1000 Watts) with the tape (placed on the H1 to H12 side of the block) facing away from each other and turn on at full power for 30 seconds. Rotate the blocks so that the tapes face towards each other and turn on at full power again for 30 seconds.

[0138] Immediately remove the blocks from the microwave and add 300 μl of sterile ice cold H₂O with the Multidrop. Seal the blocks with foil tape and place them in an H₂O ice bath.

[0139] Vortex the blocks on 5 for 15 seconds and leave them in the H₂O/ice bath. Return to step 7 until all the blocks are in the ice water bath. Incubate the blocks for 15 minutes on ice. Spin the blocks for 30 minutes in the Beckman GS-6KR with GH3.8 rotor with Microplus carrier at 3250 rpm.

[0140] Transfer 100 μl of the supernatant to Corning/Costar round bottom 96 well trays. Cover with foil and put into fridge if to be sequenced right away. If not to be sequenced in the next day, freeze them at −20° C.

[0141] Dye Primer Sequencing:

[0142] Spin down the DP brew trays and DNA template by pulsing in the Beckman GS-6KR with GH3.8 rotor with Microplus carrier. Big Dye Primer reaction mix trays (one 96 well cycleplate (Robbins) for each nucleotide), 3 microliters of reaction mix per well.

[0143] Use twelve channel pipetter (Costar) to add 2 μl of template to one each G,A,T,C, trays for each template plate. Pulse again to get both the reaction mix and template into the bottom of the cycle plate and put them into the MJ Research DNA Tetrad (PTC-225).

[0144] Start program Dye-Primer. Dye-primer is:

96° C., 1 min 1 cycle
96° C., 10 sec.
55° C., 5 sec.
70° C., 1 min 15 cycles
96° C., 10 sec.
70° C., 1 min. 15 cycles
4° C. soak

[0145] When done cycling, using the Robbins Hydra 290 add 100 μl of 100% ethanol to the A reaction cycle plate and pool the contents of all four cycle plates into the appropriate well.

[0146] To perform ethanol precipitation: Use Hydra program 4 to add 100 μl 100% ethanol to each A tray. Use Hydra program 5 to transfer the ethanol and therefore combine the samples from plate to plate. Once the G, A, T, and C trays of each block are mixed, spin for 30 minutes at 3250 in the Beckman. Pour off the ethanol with a firm shake and blot on a paper towel before drying in the speed vac (˜10 minutes or until dry). If ready to load add 3 μl dye and denature in the oven at 95° C. for ˜5 minutes and load 2 μl. If to store, cover with tape and store at −20° C.

Common Solutions

Terrific Broth
Per liter:
900 ml H₂O
12 g bacto tryptone
24 g bacto-yeast extract
4 ml glycerol

[0147] Shake until dissolved and then autoclave. Allow the solution to cool to 60° C. or less and then add 100 ml of sterile 0.17M KH₂PO₄, 0.72M K₂HPO₄ (in the hood w/ sterile technique).

0.17 M KH₂PO₄, 0.72 M K₂HPO₄
Dissolve 2.31 g of KH₂PO_{4 and 12.54 g of K}₂HPO₄ in 90 ml of H₂O.
Adjust volume to 100 ml with H₂O and autoclave.
Sequence loading Dye
20 ml deionized formamide
3.6 ml dH₂O
400 μl 0.5 M EDTA, pH 8.0
0.2 g Blue Dextran
*Light sensitive, cover in foil or store in the dark.

[0148] STET/TWEEN

10 ml 5 M NaCl
5 ml 1 M Tris, pH 8.0
1 ml 0.5 M EDTA., pH 8.0
25 ml Tween20
Bring volume to 500 ml with H₂O

[0149] The sequencing reactions are run on an ABI 377 sequencer per manufacturer's' instructions. The sequencing information obtained each run are analyzed as follows.

[0150] Sequencing reads are screened for ribosomal., mitochondrial., chloroplast or human sequence contamination.. In good sequences, vector is marked by x's. These sequences go into biolims regardless of whether or not they pass the criteria for a ‘good’ sequence. This criteria is >=100 bases with phred score of >=20 and 15 of these bases adjacent to each other.

[0151] Sequencing reads that pass the criteria for good sequences are downloaded for assembly into consensus sequences (contigs). The program Phrap (copyrighted by Phil Green at University of Washington, Seattle, Wash.) utilizes both the Phred sequence information and the quality calls to assemble the sequencing reads. Parameters used with Phrap were determined empirically to minimize assembly of chimeric sequences and maximize differential detection of closely related members of gene families. The following parameters were used with the Phrap program to perform the assembly:

| Penalty | −6 | Penalty for mismatches(substitutions) |
|---|---|---|
| Min- | 40 | Minimum length of matching sequence to use in assembly |
| match | | of reads |
| Trim | 0 | penalty used for identifying degenerate sequence at |
| penalty | | beginning and end of read. |
| Min- | 80 | Minimum alignment score |
| score | | |

[0152] Results from the Phrap analysis yield either contigs consisting of a consensus of two or more overlapping sequence reads, or singlets that are non-overlapping.

[0153] The contig and singlets assembly were further analyzed to eliminate low quality sequence utilizing a program to filter sequences based on quality scores generated by the Phred program. The threshold quality for “high quality” base calls is 20. Sequences with less than 50 contiguous high quality bases calls at the beginning of the sequence, and also at the end of the sequence were discarded. Additionally, the maximum allowable percentage of “low quality base calls in the final sequence is 2%, otherwise the sequence is discarded.

[0154] The stand-alone BLAST programs and Genbank databases were downloaded from NCBI for use on secure servers at the Paradigm Genetics, Inc. site. The sequences from the assembly were compared to the GenBank NR database downloaded from NCBI using the gapped version (2.0) of BLASTX. BLASTX translates the DNA sequence in all six reading frames and compares it to an amino acid database. Low complexity sequences are filtered in the query sequence. (Altschul et al. (1997) Nucleic Acids Res 25(17):3389-402).

[0155] Genbank sequences found in the BLASTX search with an E Value of less than 1e⁻¹⁰ are considered to be highly similar, and the Genbank definition lines were used to annotate the query sequences.

[0156] When no significantly similar sequences were found as a result of the BLASTX search, the query sequences were compared with the PROSITE database (Bairoch, A. (1992) PROSITE: A dictionary of sites and patterns in proteins. Nucleic Acids Research 20:2013-2018. ) to locate functional motifs.

[0157] Query sequences were first translated in six reading frames using the Wisconsin GCG pepdata program (Wisconsin Package Version 10.0, Genetics Computer Group (GCG) , Madison, Wis., USA. ). The Wisconsin GCG motifs Program (Wisconsin Package Version 10.0, Genetics Computer Group (GCG), Madison, Wis., USA.) was used to locate motifs in the peptide sequence, with no missmatches allowed. Motif names from the PROSITE results were used to annotate these query sequences.

TABLE 1

| | | |
|---|---|---|
| SEQ ID | Reference | Annotation |

| | | | | |
|---|---|---|---|---|
| 1 | 2025001 | 7E-95 >sp\|P4282SIDNJH_ARATH DNAJ PROTEIN HOMOLOG ATJ | | |
| | | >gi\|535588 (L36113) [Arabidopsis thaliana] >gi\|1582356\|prf\|\|121 18338A AtJ2 | | |
| | | protein_[Arabidopsis_thaliana] = 419 | | |
| 2 | 2025002 | 6E-44 >gi\|25831 34 (AC002387) proline-rich protein [Arabidopsis | | |
| | | thai janal >gi 14895234 IgbIAAD328 19.1 IAC0076591 (AC007659) unknown protein | | |
| | | [Arabidopsis thaliana]Length = 134 | | |
| 3 | 2025003 | 2E-74 ) >gb\|AAD25839.11AC006951218 (AC006951) 40S ribosomal protein S17 | | |
| | | [Arabidopsis thaliana] Length = 141 | | |
| 4 | 2025004 | 4E-27 >gi\|2995953 (AF053565) glutaredoxin I [Mesembryanthemum | | |
| | | crystallinum] Length = 134 | | |
| 5 | 2025005 | 6E-45 >emb10AA22977.11 (AL035353) photosystem I subunit PSI-E-Iike | | |
| | | protein [Arabidopsis thalianal >gi\|57322031emb10AB52678.1 (AJ245908) | | |
| | | photosystem I subunit IV precursor [Arabidopsis thaliana] Length = 143 | | |
| 6 | 2025006 | Pkc_Phospho_Site(21-23) | | |
| 7 | 2025007 | Tyr_Phospho_Site(27-34) | | |
| 8 | 2025008 | Tyr_Phospho_Site(269-277) | | |
| 9 | 2025009 | 7E-11 >sp\|P80094\|FADH_AMYME NAD/MYCOTHIOL-DEPENDENT | | |
| | | FORMALDEHYDE DEHYDROGENASE (MD-FALDH) Length = 360 | | |
| 10 | 2025010 | Tyr_Phospho_Site(609-616) | | |
| 11 | 2025011 | 7E-96 >gi\|3790554 (AF078683) RING-H2 finger protein RHA1a | | |
| | | [Arabidopsis thaliana]Length = 159 | | |
| 12 | 2025012 | 7E-34 >9b\|AAD33584.1‥AF132016_1 (AF132016) RING-H2 zinc finger protein | | |
| | | ATL6 [Arabidopsis thaliana] Length = 398 | | |
| 13 | 2025013 | Tyr_Phospho_Site(382-389) | | |
| 14 | 2025014 | 1E-108 >gi\|1335862 (U42608) clathrin heavy chain [Glycine max] Length | | |
| | | = 1700 | | |
| 15 | 2025015 | SE-11 >gi\|2795805 (AC003674) protein kinase [Arabidopsis thaliana] | | |
| | | >gi 3355493 (AC004218) protein kinase [Arabidopsis thalianal Length = 395 | | |
| 16 | 2025016 | 4E-88) >gi\|3941458 (AF062883) transcription factor [Arabidopsis | | |
| | | thaliana] Length = 184 | | |
| 17 | 2025017 | 1E-147 >gb\|AAD52685.1\|(AF179371) Cu/Zn-superoxide dismutase copper | | |
| | | chaperone precursor [Arabidopsis thaliana]Length = 310 | | |
| 18 | 2025018 | 3′ Pkc_Phospho_Site(63-65) | | |
| 19 | 2025019 | Pkc_Phospho_Site(19-21) | | |
| 20 | 2025020 | Tyr_Phospho_Site(1057-1064) | | |
| 21 | 2025021 | Tyr_Phospho_Site(532-539) | | |
| 22 | 2025022 | Wd Repeats(666-680) | | |
| 23 | 2025023 | 2E-14 >dbj\|BAAO8O94l (D45066) AOBP (ascorbate oxidase promoter- | | |
| | | binding protein) [Cucurbita maxima]Length = 380 | | |
| 24 | 2025024 | 3E-80 ) >gi\|3859606 (AF104919) contains similarity to cysteine | | |
| | | proteases (Pfam: PF00112, E = 1.3e-79, N = 1) [Arabidopsis thaliana] Length = 359 | | |
| 25 | 2025025 | 2E-36 >gi\|3168840 (U88711) copper homeostasis factor [Arabidopsis | | |
| | | thaliana]Length = 121 | | |
| 26 | 2025026 | 1E-71 >embICAB46041.11 (Z97341) gibberellin oxidase-like protein | | |
| | | [Arabidopsis thaliana]Length = 243 | | |
| 27 | 2025027 | 1 E-31 >gbIAAD298O6.11AC006264 14 (AC006264) disease resistance response | | |
| | | protein lArabidopsis thaliana]Length = 276 | | |
| 28 | 2025028 | 9E-18 >gi\|3150525 (AF067219) contains similarity to yeast dolichyl- | | |
| | | phosphate-mannose-protein mannosyltransferases [Caenorhabd tis elegansi | | |
| | | Len th = 206 | | |
| 29 | 2025029 | 2E-45 >gi\|2829896 (AC00231 1) highly similar to auxin-regulated protein | | |
| | | GH3, gpjX60033118591 [Arabidopsis thaliana]Length = 578 | | |
| 30 | 2025030 | Tyr_Phospho_Site(1 246-1253) | | |
| 31 | 2025031 | 7E-49 >sP P54887 IP5C1_ARATH DELTA 1-PYRROLIN E-5-CARBOXYLATE | | |
| | | SYNTHETASE A (P5CS A) INCLUDES: GLUTAMATE 5-KINASE (GAMMA- | | |
| | | GLUTAMYL KINASE) (GK); GAMMA-GLUTAMYL PHOSPHATE REDUCTASE | | |
| | | (GPR) (GLUTAMATE-5-SEMIALDEHYDE DEHYDROG ENASE) (GLUTAMYL- | | |
| | | GAMMA-SEM IALD E... >gi 121 295721pir1 1S66637 delta-1-pyrroline-5-carboxylate | | |
| | | synthetase - Arabidopsis thaliana >gi 1829100 Iemb 1CAA607401 (X87330) pyrroline- | | |
| | | 5-carboxylate synthetase [Arabidopsis thaliana]>gi 1870866 IembICAA6O446 I | | |
| | | (X86777) pyrroline-5-carboxylate synthetase A [Arabidopsis thalianal | | |
| | | >gi\|1041248 IembICAA6 15931 (X8941 4) pyrrol ine-5-carboxylate synthase | | |
| | | [Arabidopsis thailiana]>gi\|2642 162 (ACOO3000) delta-i -pyrroline 5-carboxylase | | |
| | | synthetase, P5CI [Arabidopsis thaliana]Length 717 | | |
| 32 | 2025032 | 1E-121 >embjCAAl8469.1 (AL022347) serine/threonine kinase-like protein | | |
| | | [Arabidopsis thaliana]Length = 900 | | |
| 33 | 2025033 | 2E-52 >embICAAl 9717.11(AL030978) histone H2A-like protein [Arabidopsis | | |
| | | thaliana]Length = 131 | | |
| 34 | 2025034 | Tyr_Phospho_Site(1011-1019) | | |
| 35 | 2025035 | 1E-149 >pir11545033 probable imbibition protein - wild cabbage | | |
| | | | | >gi 14887871emb jCAA55893 I (X79330) imbibition protein [Brassica oleracea] |
| | | | | Length = 76S |
| 36 | 2025036 | Tyr_Phospho_Site(127-133) | | |
| 37 | 202S037 | 1E-101 >gi\|3822223 (AF077955) branched-chain alpha keto-acid | | |
| | | dehydrogenase El alpha subunit [Arabidopsis thaliana]Length = 472 | | |
| 38 | 2025038 | SE-SO >spIP41376IlF41 ARATH EUKARYOTIC INITIATION FACTOR 4A-1 | | |
| | | (EIF-4A-1) >gi\|322503jpirIjJC1452 translation initiation factor elF-4A1 - | | |
| | | Arabidopsis thaliana >gij 1 6SS4IembICAA46l 881 (X65052) eukaryotic translation | | |
| | | initiation factor 4A-1 Arabido sis thaliana Len th = 412 | | |
| 39 | 202S039 | Tyr_Phospho_Site(1 162-1168) | | |
| 40 | 202S040 | 3E-76 >embICAB4588l .11 (AL080282) berberine bridge enzyme-like protein | | |
| | | [Arabidopsis thaliana]Length = S30 | | |
| 41 | 2025041 | Tyr_Phospho_Site(275-283) | | |
| 42 | 2025042 | 5E-85 >spIP43293INAK_ARATH PROBABLE SERINE/THREONINE- | | |
| | | PROTEIN KINASE NAK >giI48I2O6ipirj 1S38326 protein kinase - Arabidopsis | | |
| | | thaliana >gi\|166809 (L07248) protein kinase [Arabidopsis thaliana]Length = 389 | | |
| 43 | 202S043 | IE-113 >embjCAAO7575.11 (AJ007588) monooxygenase [Arabidopsis | | |
| | | thaliana]>4j4467141 IembICAB375lOI (AL035540) monooxygenase 2 (M02) | | |
| | | [Arabidopsis thaliana]Length = 407 | | |
| 44 | 2025044 | TyrPhospho...5ite(807-815) | | |
| 45 | 2025045 | 1 E-61 >embjCAAO7004I (AJ006404) late elongated hypocotyl [Arabidopsis | | |
| | | thaliana]Length = 645 | | |
| 46 | 2025046 | 3E-1 2 >gb\|AAD4641 2.1 1AF0962629 (AF096262) ER6 protein [Lycopersicon | | |
| | | esculentum]Length = 168 | | |
| 47 | 2025047 | Pkc_PhosphoSite(36-38) | | |
| 48 | 2025048 | 2E-17 >embjCAB43938.1j (AJ006349) endo-beta-1,4-glucaflaSe [Fragaria x | | |
| | | ananassa]Length = 620 | | |
| 49 | 2025049 | 7E-93 ) >5p1P484821PP12_ARATH SERINEITHREONINE PROTEIN | | |
| | | PHOSPHATASE PP1 ISOZYME 2 >gi 1421851 IpirlIS3l 086 phosphoprotein | | |
| | | phosphatase (EC 3.1.3.16) 1 catalytic chain (clone TOPP2) - Arabidopsis thaliana | | |
| | | >gi\|166797 (M93409) catalyt | | |
| 50 | 2025050 | 5E-80 >embICAB3968l .11 (AL049483) thioredoxin [Arabidopsis thaliana] | | |
| | | Length = 221 | | |
| 51 | 2025051 | 6E-24 >gb\|AAD25579.1IAC0072119 (AC007211) aSPFI protein [Arabidopsis | | |
| | | thalianal Length = 487 | | |
| 52 | 2025052 | 9E-68 ) >gb\|AAD37363.1 IAF 144078.9 (AF 144078) alpha-xylosidase precursor | | |
| | | [Arabidopsis thaliana]>gi\|5734722jgbjAAD49987.1 jAC008075_20 (AC008075) | | |
| | | Identical to gbIAFl 44078 alpha-xylosidase precursor from Arabidopsis thaliana. | | |
| | | ESTs gb1W43892, gbIN96l 65, gb1T46694, gb\|N37141, gb\|R64965, gb1R90271, | | |
| | | gbIAA651443, gbiAA7l23O5, gb1T04189 and gbiAA597852 c... Length 915 | | |
| 53 | 2025053 | 4E-1 8 >gbIAAD1 74281 (AC006284) methyltransferase [Arabidopsis | | |
| | | thalianal Length 619 | | |
| 54 | 2025054 | 1 E-1 17 >embjCAA23048.11 (AL035394) polygalacturonase [Arabidopsis | | |
| 55 | 2025055 | 1 E-44 >gbjAAD49770.1 1AC00793298 (AC007932) Similar to gbIYI 2465 | | |
| 56 | 20250567E-16 >pir1lA49318 protein kinase (EC 2.7.1.37) tousled - Arabidopsis | | | |
| 57 | 2025057 | 3E-1 7 >gi\|3482908 (AC005551) R26529_2, partial CDS [Homo sapiens] | | |
| | | Length = 197 | | |
| 58 | 2025058 | 1E-19 >gij2145020 (U82982) GEC-3 [Cavia porcellus]Length = 620 | | |
| 59 | 2025059 | Tyr_Phospho_Site(28-35) | | |
| 60 | 2025060 | Tyr_Phospho_Site(412-419) | | |
| 61 | 2025061 | Pkc_Phospho_Site(89-91) | | |
| 62 | 2025062 | Tyr_Phospho_Site(66-73) | | |
| 63 | 2025063 | 1E-19 >dbjIBAA8362O.1I (AB029341) TBP-interacting protein TIPI2O | | |
| | | alternatiely spliced form Rattus norvegicusi Length = 1273 | | |
| 64 | 2025064 | Tyr_Phospho_Site(1522-1529) | | |
| 65 | 2025065 | Tyr_Phospho_Site(475-482) | | |
| 66 | 2025066 | 1 E-84 >gbIAAD3989I .1 IAFi 069301 (AFI 06930) translation initiation protein | | |
| | | [Medicago truncatula]Length = 935 | | |
| 67 | 2025067 | Tyr Phos ho Site 794-801 | | |
| 68 | 2025068 | 2E-25 >5pIP466671ATH5_ARATH HOMEOBOX-LEUCINE ZIPPER PROTEIN | | |
| | | ATHB-5 (HD-ZIP PROTEIN ATHB-5) >gi\|629504ipir11547135 homeotic protein | | |
| | | Athb-5-Arabidopsis thaliana >gi\|499160IembICAA47426l (X67033) Athb-5 | | |
| | | Arabido sis thaliana L | | |
| 69 | 2025069 | Pkc_Phospho_Site(5-7) | | |
| 70 | 2025070 | Tyr_Phospho_Site(850-857) | | |
| 71 | 2025071 | Tyr_Phospho_Site 945-953 | | |
| 72 | 2025072 | 4E-90 > sp\|P42791\|RL18_ARATH 60S RIBOSOMAL PROTEIN L18 > gi\|606970 | | |
| | | (U15741) cytoplasmic ribosomal protein L18 [Arabidopsis thaliana] Length = 187 | | |
| 73 | 2025073 | 4E-58 > dbj\|BAA77603.1\| (AB027002) plastidic aldolase [Nicotiana | | |
| | | paniculata] Length = 398 | | |
| 74 | 2025074 | Tyr_Phospho Site(1030-1036) | | |
| 75 | 2025075 | Tyr_Phospho Site(42-49) | | |
| 76 | 2025076 | 4E-90 > dbj\|BAA78331.1\| (AB014076) histidine decarboxylase [Brassica | | |
| | | napus] Length = 490 | | |
| 77 | 2025077 | 3E-22 > pir\|\|A30191 hypothetical protein L - Bacillus subtilis (fragment) | | |
| | | Length = 171 | | |
| 78 | 2025078 | 9E-33 > sp\|O23760\|COMT_CLABR CAFFEIC ACID 3-O- | | |
| | | METHYLTRANSFERASE (S-ADENOSYSL-L-METHIONINE:CAFFEIC ACID 3-O- | | |
| | | METHYLTRANSFERASE) (COMT) > gi\|2240207 (AF006009) caffeic acid O- | | |
| | | methyltransferase [Clarkia breweri] Length = 370 | | |
| 79 | 2025079 | 2E-55 > sp\|O64765\|UAP1_ARATH PROBABLE UDP-N- | | |
| | | ACETYLGLUCOSAMINE PYROPHOSPHORYLASE > gi\|3033397 (AC004238) | | |
| | | unknown protien [Arabidopsis thaliana] Length = 502 | | |
| 80 | 2025080 | 7E-27 > gb\|AAD46402.1\|AF096246_1 (AF096246) ethylene-responsive | | |
| | | transcriptional coactivator [Lycopersicon esculentum] Length = 146 | | |
| 81 | 2025081 | Tyr_Phospho_Site(102-110) | | |
| 82 | 2025082 | Rgd(1288-1290) | | |
| 83 | 2025083 | Pkc_Phospho_Site(10-12) | | |
| 84 | 2025084 | 1E-79 > emb\|CAB36755.1\| (AL035523) protein-methionine-S-oxide | | |
| | | reductase [Arabidopsis thaliana] Length = 258 | | |
| 85 | 2025085 | 7E-47 > gi\|2078350 (U95923) transaldolase [Solanum tuberosum] Length = | | |
| | | 438 | | |
| 86 | 2025086 | Tyr_Phospho_Site(2057-2063) | | |
| 87 | 2025087 | Pkc_Phospho_Site(77-79) | | |
| 88 | 2025088 | 0 > sp\|P43296\|RD19_ARATH CYSTEINE PROTEINASE RDI9A PRECURSOR > | | |
| | | gi\|541856\|pir\|\|JN0718 drought-inducible cysteine proteinase (EC 3.4.22.-) RD19A | | |
| | | precursor - Arabidopsis thaliana > gi\|435618\|dbj\|BAA02373\| (D13042) thiol | | |
| | | protease [Arabidopsis thaliana] > gi\|4539328\|emb\|CAB38829.1\| (AL035679) | | |
| | | drought-inducible cysteine proteinase RD19A precursor [Arabidopsis thaliana] | | |
| | | Length = 368 | | |
| 89 | 2025089 | 3E-98 > emb\|CAA92583\| (Z68291) cysteine protease [Pisum sativum] | | |
| | | Length = 350 | | |
| 90 | 2025090 | 8E-88 > gi\|1245182 (U49398) sterol delta-7 reductase [Arabidopsis | | |
| | | thaliana] Length = 430 | | |
| 91 | 2025091 | Tyr_Phospho_Site(1016-1023) | | |
| 92 | 2025092 | 9E-14 > gi\|4097547 (U64906) ATFP3 [Arabidopsis thaliana] Length = 297 | | |
| 93 | 2025093 | 1E-115 > gi\|3785999 (AC005499) peptidyl-prolyl cis-trans isomerase | | |
| | | [Arabidopsis thaliana] Length = 199 | | |
| 94 | 2025094 | Tyr_Phospho_Site(328-334) | | |
| 95 | 2025095 | 4E-46 > sp\|Q42614\|NLT1_BRANA NONSPECIFIC LIPID-TRANSFER | | |
| | | PROTEIN 1 PRECURSOR (LTP 1) > gi\|732520 (U22105) germination-specific lipid | | |
| | | transfer protein 1 [Brassica napus] Length = 117 | | |
| 96 | 2025096 | Tyr_Phospho_Site(512-519 | | |
| 97 | 2025097 | Tyr_Phospho_Site(781-789) | | |
| 98 | 2025098 | 1E-102 > emb\|CAA04707\| (AJ001374) alpha-glucosidase [Solanum | | |
| | | tuberosum] Length = 919 | | |
| 99 | 2025099 | Pkc_Phospho_Site(320-322) | | |
| 100 | 2025100 | Zinc_Protease(861-870) | | |
| 101 | 2025101 | Tyr_Phospho_Site(592-600) | | |
| 102 | 2025102 | 1E-29 >emblCAAl5O99l(AJ235272) SOS RIBOSOMAL PROTEIN L3 | | |
| 103 | 2025103 | 3′ Pkc_Phospho_Site(38-40) | | |
| 104 | 2025104 | 5′ Pkc Phos ho Site 18-20 | | |
| 105 | 2025105 | 4E-59 >pir11560129 H+-transporting ATPase (EC 3.6.1.35), vacuolar, 16K | | |
| | | pumping ATPase 16 kDa proteolipid [Arabidopsis thaliana]>gi\|926933 (L | | |
| 106 | 2025106 | 1E-116 ) >spIP46643IAATL.ARATH ASPARTATE AMINOTRANSFERASE, | | |
| | | MITOCHONDRIAL PRECURSOR (TRANSAMINASE A) >gi\|693688 (U15026) | | |
| | | aspartate aminotransferase [Arabidopsis thaliana]>9113201622 (AC004669) | | |
| | | aspartate aminotransferase [Arabido | | |
| 107 | 2025107 | 3E-61 ) >gbIAAD5S28S.11AC00826396 (AC008263) Similar to gbIAF135422 | | |
| | | GDP-mannose pyrophosphorylase A (GMPPA) from Homo sapiens. ESTs | | |
| | | gbIAA7I 2990, gbjN65247, gbjN38l 49, gb\|T041 79, gb1Z38092, gb1T76473, | | |
| | | gb1N96403, gbIAA394551 and gbj | | |
| 108 | 2025108 | 6E-72 >splP55737IHS82_ARATH HEAT SHOCK PROTEIN 81-2 (HSP8I-2) | | |
| | | >gij445127jprf\|j1908431B heat shock protein HSP8I-2 [Arabidopsis thaliana] | | |
| | | Length = 699 | | |
| 109 | 2025109 | Rgd(531-533) | | |
| 110 | 2025110 | 3E-39 >pir11539445 DNA-directed RNA polymerase (EC 2.7.7.6)11 chain 9 | | |
| | | - fruit fly (Drosophila melanogaster) >gij4S3Ol 1 lbbsll 39686 (S66940) RNA | | |
| | | polymerase II subunit 9, RPII15 B9 {EC 2.7.7.6}[Drosophila melanogaster, | | |
| | | Peptide, 129 aa][Drosophila melanogaster]Length 129 | | |
| 111 | 2025111 | 2E-51 >embICABSO787.11 (AJ243528) glyoxalase I [Triticum aestivum] | | |
| | | Length = 284 | | |
| 112 | 2025112 | PtsHprSer(1091-1106) | | |
| 113 | 2025113 | 1 E-106 >gi\|3128188 (AC004521) beta-glucosidase [Arabidopsis | | |
| | | thaliana]Length 577 | | |
| 114 | 2025114 | 4E-93 >g\|j3738327 (AC005170) serine carboxypeptidase [Arabidopsis | | |
| | | thaliana]Length = 474 | | |
| 115 | 2025115 | Tyr_Phospho_Site(51 8-524) | | |
| 116 | 2025116 | 4E-70 >gbIAADS0O11.1IAC0O7651fi (AC007651) Similar to translation initiation | | |
| | | factor 1F2 [Arabidopsis thalianal Length = 1016 | | |
| 117 | 2025117 | 1 E-17 >spjP41 73411AH1_YEAST ISOAMYL ACETATE-HYDROLYZING | | |
| | | ESTERASE >91110771 851pir1154991 1 hypothetical protein YORI 26c - yeast | | |
| | | (Saccharomyces cerevisiae) >g\|I600023Iemb ICAA581 041 (X82930) ORE | | |
| | | Saccharomyces cerevisiae) >g\|11050 | | |
| 118 | 2025118 | 3′ Tyr_Phospho_Site(523-530) | | |
| 119 | 2025119 | 5′ Rgd(1053-1055) | | |
| 120 | 2025120 | 2E-52 >embICAAO7S66I (AJ007578) pRIBS protein Ribes nigrumi Length | | |
| | | = 2S8 | | |
| 121 | 2025121 | 5E-96 >gi\|2708813 (AF037362) ATA2O [Arabidopsis thaliana]Length | | |
| | | 432 | | |
| 122 | 2025122 | 1 E-63 >emb CAB 10269.11 (Z97337) hydroxyprol me-rich glycoprotein | | |
| | | homolog [Arabidopsis thalianal Length = 507 | | |
| 123 | 2025123 | Tyr_Phospho_Site(1 3-20) | | |
| 124 | 202S124 | 4E-24 >embICAA74S911 (Y14199) MAP3K delta-i protein kinase | | |
| | | [Arabidopsis thaliana]Length = 406 | | |
| 125 | 202512S | IE-14 >gi\|308906 (L18909) thioredoxin [Lilium longiflorum]Length = 262 | | |
| 126 | 2025126 | Tyr_Phospho_Site(60-68) | | |
| 127 | 202S127 | lE-ilO ) >embfCAA06978.11 (AJ006309) protein tyrosine phosphatase | | |
| | | Arabido sis thaliana Len th = 340 | | |
| 128 | 2025128 | 6E-50 >embICAA7OS78I(Y09427) squamosa-promoter binding protein like | | |
| | | 3 [Arabidopsis thaliana]>g\|5931 6511embICAB56579.11 (AJOI 1627) squamosa | | |
| | | promoter binding protein-like 3 [Arabidopsis thaliana] | | |
| | | >gi\|59316631emb10AB56585.1 (AJ01 1633) squamosa promoter binding protein- | | |
| | | like 3 [Arabidopsis thaliana]Length = 131 | | |
| 129 | 2025129 | 4E-47 >gi\|2708813 (AF037362) ATA20 [Arabidopsis thaliana]Length = | | |
| | | 432 | | |
| 130 | 2025130 | Tyr_Phospho_Site(88-96) | | |
| 131 | 2025131 | 3′ Protein Splicing(530-537) | | |
| 132 | 2025132 | 3′ Tyr_Phospho_Site(504-512) | | |
| 133 | 2025133 | 3E-23 >gb\|AAD55621 .1 IACOO8OI 631 (ACOO8O1 6) Is a member of PF100534 | | |
| | | Glycosyl transferases group 1. EST gb\|N967O2 comes from this gene. | | |
| | | [Arabidopsis thaliana]Length = 670 | | |
| 134 | 2025134 | 3E-95 >gi\|1912286 (U39568) type 2A serine/threonine protein | | |
| | | phosphatase [Arabidopsis thaliana]>gi\|2194141 (AC002062) Match to Arabidopsis | | |
| | | protein phosphatase PP2A (gb1U39568). EST gbjT4l 959 comes from this gene. | | |
| | | [Arabidopsis thaliana]Length = 307 | | |
| 135 | 2025135 | 7E-83 >gi\|3608147 (AC005314) chloroplast 31 kDa ribonucleoprotein | | |
| | | precursor [Arabidopsis thaliana]Length = 308 | | |
| 136 | 2025136 | Tyr_Phospho_Site(130-138) | | |
| 137 | 2025137 | Tyr_Phospho_Site(1644-1651) | | |
| 138 | 2025138 | 7E-23 >gi\|2708532 (AF029351) RNA binding protein Nicotiana | | |
| | | tabacum]Length = 482 | | |
| 139 | 2025139 | Pkc_Phospho_Site(111-113) | | |
| 140 | 2025140 | 3′ 2E-30 >gi\|1 346756I5pIP48483IPP1 3ARATH SERINE/THREONINE | | |
| | | PROTEIN PHOSPHATASE PP1 ISOZYME 3 >gi\|421852jpirIjS31087 | | |
| | | phosphoprotein phosphatase (EC 3.1.3.16) 1 catalytic chain (clone TOPP3) - | | |
| | | Arabidopsis thaliana >gi\|166799 (M93410) phosphoprotein phosphatase I | | |
| | | [Arabidopsis thaliana]Length = 322 | | |
| 141 | 2025141 | 3′ Tyr_Phospho_Site(181-188) | | |
| 142 | 2025142 | 3′ 3E-54 >gi\|28333801sp1Q425831KPR2_ARATH RIBOSE-PHOSPHATE | | |
| | | PYROPHOSPHOKINASE 2 (PHOSPHORIBOSYL PYROPHOSPHATE | | |
| | | SYNTHETASE 2) (PRS II) >gij2l46772IpiriiS7l 262 ribose-phosphate | | |
| | | pyrophosphokinase (EC 2.7.6.1)11 - Arabidopsis thaliana (fragment) | | |
| | | >gi 1 064885IembICAA63552.1I (X92974) phosphoribosyl | | |
| 143 | 2025143 | 3E-22 >gif 3790677 (AF099002) similar to human 5′ -nucleotidase | | |
| | | (SW:P49902) [Caenorhabditis elegans]Length = 526 | | |
| 144 | 2025144 | 4E-82 >gi\|3337361 (AC004481) ankyrin-like protein [Arabidopsis | | |
| | | thaliana]Length 770 | | |
| 145 | 2025145 | 5E-43 >pir11553490 RNA-binding protein cp29 precursor - Arabidopsis | | |
| | | thaliana >gij68l9O2jdbjIBAAO6Sl8I (D31710) cp29 [Arabidopsis thaliana]Length = | | |
| | | 334 | | |
| 146 | 2025146 | 9E-79 ) >gij2062157 (AC001645)jasmonate inducible protein isolog | | |
| | | [Arabidopsis thaliana]Length = 705 | | |
| 147 | 2025147 | 5′ 1E-106 >gi\|1076285IpirIIS5262I amidophosphoribosyltransferase - | | |
| | | Arabidopsis thaliana >gi 14691 9SIdbi 1BAA06024 I (D28869) | | |
| | | amidophosphoribosyltransferaSe [Arabidopsis thaliana]Length = 548 | | |
| 148 | 2025148 | 9E-43 >gi\|2982253 (AF051209) CROC-1 -like protein [Picea mariana] | | |
| | | Length = 140 | | |
| 149 | 2025149 | 7E-87 ) >gi\|3193298 (AF069298) T14P8.17 gene product [Arabidopsis | | |
| | | thaliana]Length = 154 | | |
| 150 | 2025150 | 9E-78 >gi 12583125 (AC002387) transketolase precursor [Arabidopsis | | |
| | | thaliana]Length = 741 | | |
| 151 | 2025151 | 2E-79 >gbIAAD2I4SI.11 (AC007017) DNA-binding protein [Arabidopsis | | |
| | | thaliana]Length = 145 | | |
| 152 | 2025152 | 1E-12 >9112661079 (AF035316) similar to beta tubulin [Homo sapiens] | | |
| | | Length = 342 | | |
| 153 | 2025153 | 7E-26 >gbIAAD49985.1 1AC0080759 8 (AC008075) Contains PEIOl 426 BAH | | |
| | | (bromo-adjacent homojogy) domain. ESTs gbfN96349, gbfT42710, gb(H77084, | | |
| | | gbfAA395 147 and gbjAA6O5500 come from this gene. [Arabidopsis thaliana] | | |
| | | Length = 625 | | |
| 154 | 2025154 | Tyr_Phospho_Site(163-171) | | |
| 155 | 2025155 | 4E-63 >gi\|735880 (L40577) geranylgeranyl pyrophosphate synthase | | |
| | | protein [Arabidopsis thaliana]Length = 326 | | |
| 156 | 2025156 | 6E-2 1 >gbIAAFOO649. 1 IACOO8 1531 (ACOO81 53) UDP-glucuronosyltransferase, | | |
| | | 5′ partial [Arabidopsis thalianal Length 227 | | |
| 157 | 2025157 | 3E-55 >spIP549O4IPROCARATH PYRROLINE-5-CARBOXYLATE | | |
| | | REDUCTASE (P5CR) (P50 REDUCTASE) >gi\|5418941pir11JQ2334 pyrroline-5- | | |
| | | carboxylate reductase (EC 1.5.1.2) - Arabidopsis thaliana >giIl 66815 (M76538) | | |
| | | pyrroline carboxylate reductase [Arabidopsis thaliana] | | |
| | | >giI1632776jemb\|CAA70148I (Y08951) TSr protein [Arabidopsis thaliana]Length = | | |
| | | 276 | | |
| 158 | 2025158 | Tyr_Phospho_Site(482-490) | | |
| 159 | 2025159 | Tyr_Phospho_Site(551-558) | | |
| 160 | 2025160 | 3E-85 >gi\|4191784 (AC005917) WD-40 repeat protein fArabidopsis | | |
| | | thaliana]Length = 469 | | |
| 161 | 2025161 | 4E-52 >emblCAA478O7I (X67421) extA [Arabidopsis thaliana]Length = | | |
| | | 127 | | |
| 162 | 2025162 | 7E-17 >gbjAAC96965.1 (U42580) A638R [Paramecium bursaria Chiorella | | |
| | | virus 1]Length = 360 | | |
| 163 | 2025163 | 4E-64 >embjCAAO5727j (AJ002892) AtGRP2 [Arabidopsis thaliana] | | |
| | | Length = 150 | | |
| 164 | 2025164 | 3E-66 >gi\|1628583 (U66916) 12S cruciferin seed storage protein | | |
| | | [Arabidopsis thaliana]>giI284249SIembICAAl 6892.11 (ALO2 1749) 125 cruciferin | | |
| | | seed storage protein [Arabidopsis thaliana]Length = 524 | | |
| 165 | 2025165 | 1E-104 >gij2160158 (AC000132) Similarto elongation factor 1-gamma | | |
| | | (gbjEF1GXENLA). ESTs gblT20564,gb1T45940,gb1T04527 come from this gene. | | |
| | | [Arabidopsis thalianal Length = 414 | | |
| 166 | 2025166 | Pkc_Phospho_Site(5-7) | | |
| 167 | 2025167 | Tyr_Phospho_Site(703-709) | | |
| 168 | 2025168 | Tyr_Phospho_Site(1038-1046) | | |
| 169 | 2025169 | Pkc_Phospho_Site(31-33) | | |
| 170 | 2025170 | 1E-22 >gij1871181 (U90439) ring zinc finger protein isolog [Arabidopsis | | |
| | | thaliana]Length = 425 | | |
| 171 | 2025171 | Tyr_Phospho_Site(558-565) | | |
| 172 | 2025172 | Pkc_Phospho_Site(13-15) | | |
| 173 | 2025173 | 0 >embjCABl0450.11 (Z97341) acyl-CoA oxidase like protein [Arabidopsis | | |
| 174 | 2025174 | 8E-65 >pirjjD36571 ubiquitin 81-aa extension protein 2 -Arabidopsis | | |
| | | (UBO6) [Arabidopsis thaliana]Length = 157 | | |
| 175 | 2025175 | 3E-76 >spIO644S9IUDPGPYRPY UTP-GLUCOSE-1-PHOSPHATE | | |
| | | URIDYLYLTRANSFERASE (UDP-GLUCOSE PYROPHOSPHORYLASE) | | |
| | | (UDPGP) (UGPASE) >giI3 107931 idbjlBAA259l 71 (ABOl 3353) UDP-glucose | | |
| | | pyrophosphorylase [Pyrus pyrifolia]Length = 471 | | |
| 176 | 2025176 | Pkc_PhosphoSite(29-31) | | |
| 177 | 2025177 | 4E-49 >embICAA17547.11 (AL021960) photosystem II oxygen-evolving | | |
| | | complex protein 3-like [Arabidopsis thaliana]>gi\|3402748femb10AA20194.1J | | |
| | | (AL031 187) photosystem II oxygen-evolving complex protein 3-like [Arabidopsis | | |
| | | thai | | |
| 178 | 2025178 | Tyr_Phospho_Site(564-57l) | | |
| 179 | 2025179 | 1E-109 ) >spIP43297lRD2t..ARATH CYSTEINE PROTEINASE RD2IA | | |
| | | PRECURSOR >g\|5418571pir11JN0719 drought-inducible cysteine proteinase (EC | | |
| | | 3.4.22.-) RD2IA precursor - Arabidopsis thaliana >gij435619fdbj1BAA023741 | | |
| | | D13043 thiol roteas | | |
| 180 | 2025180 | 1E-113 ) >sp\|Q42560\|ACOC_ARATH ACONITATE HYDRATASE, | | |
| | | CYTOPLASMIC (CITRATE HYDRO-LYASE) (ACONITASE) Length 897 | | |
| 181 | 2025181 | 6E-60 >gi\|1785615 (U83281) protein kinase homolog PsPK4 [Pisum | | |
| | | sativumi Length = 443 | | |
| 182 | 2025182 | Pkc_Phospho_Site(11-13) | | |
| 183 | 2025183 | 4E-73 >sp10233651C973_ARATH CYTOCHROME P450 97B3 | | |
| 184 | 2025184 | T r Phos ho Site 569-576 | | |
| 185 | 2025185 | Tyr_Phospho_Site(445-453) | | |
| 186 | 2025186 | Tyr_Phospho_Site(754-761) | | |
| 187 | 2025187 | Tyr_Phospho_Site(802-810) | | |
| 188 | 2025188 | 9E-82 >gi\|1009234 (L38829) SUP2 gene product [Nicotiana tabacum] | | |
| | | Length = 409 | | |
| 189 | 2025189 | 5E-69 >embICAAO72511 (AJ006787) phytochelatin synthetase | | |
| | | [Arabidopsis thaliana]Length = 362 | | |
| 190 | 2025190 | Rgd(1210-1212) | | |
| 191 | 2025191 | 1E-41 >gi\|2352492 (AF005047) transport inhibitor response 1 | | |
| 192 | 2025192 | Tyr_Phospho_Site(231-238) | | |
| 193 | 2025193 | 3E-60 >spIPIO797IRBS3_ARATH RIBULOSE BISPHOSPHATE | | |
| | | 2B) >gi\|68061 IpirIIRKMUB2 ribulose-bisphosphate carboxylase (EC 4.1.1.39) | | |
| | | small chain B2 precursor - Arabidopsis thaliana >giIl6lg4IembICAA327Ol I | | |
| | | (X14564) ribulose bisphosphate carboxylase [Arabidopsis thaliana]Length = 181 | | |
| 194 | 2025194 | 2E-35 >embICAA5652I j (X80237) mitochondrial processing peptidase | | |
| | | [Solanum tuberosum]Length = 534 | | |
| 195 | 2025195 | 6E-54 >embICAB53O33.1I (AJ245866) photosystem I subunitX precursor | | |
| | | Arabido sis thaliana Len th 130 | | |
| 196 | 2025196 | 3E-36 >gb\|AAD38988.1 AEl 558181 (AFi 55818) zinc finger protein Dof4 | | |
| | | [Arabidopsis thalianal Length = 264 | | |
| 197 | 2025197 | 3E-41 >gi\|3152606 (AC004482) ring zinc finger protein [Arabidopsis | | |
| | | thaliana]Length = 227 | | |
| 198 | 2025198 | 1E-104 >gb\|AAD181091 (AC006403) protein kinase [Arabidopsisthalianal | | |
| | | Length = 407 | | |
| 199 | 2025199 | 3E-15 >giI3643807 (AF062071) zinc finger protein ZNF2I6 [Mus | | |
| | | musculus Len th = 213 | | |
| 200 | 2025200 | 9E-12 >gi\|3924605 (AF069442) inhibitor of apoptosis [Arabidopsis | | |
| | | thaliana]Length = 864 | | |
| 201 | 2025201 | 7E-91 ) >embICAAOSO24I (AJOOI 808) succinyl-CoA-ligase beta subunit | | |
| | | [Arabidopsis thaliana]>gi\|4512693IgbjAAD21746.1 I (AC006569) succinyl-CoA | | |
| | | ligase beta subunit [Arabidopsis thalianal Length = 421 | | |
| 202 | 2025202 | Pkc_PhosphoSite(37-39) | | |
| 203 | 2025203 | 1 E-1 13 >ir S68223lutathione s nthase EC 6.3.2.3 2 - Arabido sis | | |
| | | thaliana (fragment) >giIl 1 O75O3IembICAA9O5l SI (Z501 53) glutathione synthetase | | |
| | | tArabidopsis thaliana]>gi\|I 5855601prf11220l 360A glutathione synthetase | | |
| | | [Arabidopsis thaliana]Length 510 | | |
| 204 | 2025204 | 5E-61 >spIP34IO6IALA2_PANMI ALAN INE AMINOTRANSFERASE 2 (GPT) | | |
| | | (GLUTAMIC-PYRUVIC TRANSAMINASE 2) (GLUTAMIC-ALANIN E | | |
| | | TRANSAMINASE 2) (ALAAT-2) >gi\|320619\|pirIIS28429 alanine transaminase (EC | | |
| | | 2.6.1.2) - proso millet >gi\|296204IembICAA49199l (X69421) alanine | | |
| | | aminotransferase Panicum miliaceum Len th = 482 | | |
| 205 | 2025205 | Pkc_PhosphoSite(55-57) | | |
| 206 | 2025206 | 5E-27 >spIQ388O5IMT2B_ARATH METALLOTHIONEIN-LIKE PROTEIN 2B | | |
| | | (MT-2B) >gi\|13619991pir11557862 metallothionein 2b - Arabidopsis thaliana | | |
| | | >gi\|1086463 (Ul 1256) metallothionein [Arabidopsis thaliana]Length 77 | | |
| 207 | 2025207 | 2E-13 >reflNP004732.1IPP13OI nucleolar phosphoprotein p130 | | |
| | | >giI2l 358421pir11138073 nucleolar phosphoprotein p130 - human | | |
| | | >gi 1663008 lemblCAA84O63I (Z34289) nucleolar phosphoprotein p130 [Homo | | |
| | | sapiens]Length = 699 | | |
| 208 | 2025208 | 9E-60 >giI3201612 (AC004669) 2A6 protein [Arabidopsis thaliana] | | |
| | | Length = 362 | | |
| 209 | 2025209 | 6E-64 >gij3l 57947 (ACOO2I 31) Similar to protein gbIZ74962 from | | |
| | | Brassica oleracea which is similar to bacterial YRN1 and HEAHIO proteins. ESTs | | |
| | | gbIT2l 954, gbjT04283, gbjZ37609, gbjN37366, gbIR90704, gbjFl 5500 and | | |
| | | gb1F14353 come from this gene. [Arabidopsis tha... Length = 283 | | |
| 210 | 2025210 | 3′ Pkc_Phospho_Site(2-4) | | |
| 211 | 2025211 | 6E-32 >spIPO5100I3MG1_ECOLI DNA-3-METHYLADENINE GLYCOSYLASE I | | |
| | | (3-METHYLADENINE-DNA GLYCOSYLASE I, CONSTITUTIVE) (TAG I) (DNA-3- | | |
| | | METHYLADEN IN E GLYCOSIDASE I) >gij675O8jpirIIDGECM I 3-methyladenine | | |
| | | DNA glycosylase (EC 3.2.2.-) I - Escherichia coli >gi\|430301emb10AA274721 | | |
| | | (X03845) TA | | |
| 212 | 2025212 | 2E-78 >embICAA72l 771 (YI 1336) RGAI protein [Arabidopsis thaliana] | | |
| | | Length = 587 | | |
| 213 | 2025213 | 2E-78 >gb\|AAD39281.1 1AC007576A (AC007576) initiation factor 5A-4 | | |
| | | [Arabidopsis thaliana]Length = 158 | | |
| 214 | 2025214 | 1 E-28 >g113860261 (AC005824) acidic ribosomal protein [Arabidopsis | | |
| 215 | 2025215 | Tyr_Phospho_Site(284-291) | | |
| 216 | 202S216 | T r Phos ho Site 598-604 | | |
| 217 | 2025217 | Pkc_Phospho_Site(45-47) | | |
| 218 | 2025218 | Pkc_Phospho_Site(16-18) | | |
| 219 | 2025219 | Tyr_Phospho_Site(43-51) | | |
| 220 | 2025220 | 7E-59 >pir\|1S581 18 thioredoxin - Arabidopsis thaliana | | |
| 221 | 2025221 | 7E-65 >spIP49O78IASNS_ARATH ASPARAGINE SYNTHETASE | | |
| | | [Arabidopsis thaliana]>gi\|5541 701 lembiCABsi 206.11 (AL096860) glutamine- | | |
| | | dependent asparagine synthetase [Arabidopsis thaliana]Length = 584 | | |
| 222 | 2025222 | 3′ Tyr_Phospho_Site(1 63-170) | | |
| 223 | 2025223 | 5′ 2E-38 >gij4126809jdbj1BAA36759i (ABOl 7042) glyoxalase I [Oryza sativa] | | |
| | | Length = 291 | | |
| 224 | 202S224 | 2E-68 >gi\|3980385 (AC004561) 18 kDa class I heat shock protein | | |
| | | [Arabidopsis thaliana]Length = 153 | | |
| 225 | 202S225 | 1 E-21 >gbIAAC787O4.11 (AF001308) predicted glycosyl transferase | | |
| | | [Arabidopsis thaliana]Length = 346 | | |
| 226 | 2025226 | 9E-91 >gi\|2286069 (U721 55) beta-glucosidase [Arabidopsis thaliana] | | |
| | | Length = 528 | | |
| 227 | 2025227 | 2E-33 >9bIAAD23647.11AC007119 13 (AC007119) 40S ribosomal protein S25 | | |
| | | (Arab idopsis thaliana]Length = 108 | | |
| 228 | 2025228 | Tyr_Phospho_Site(1003-1010) | | |
| 229 | 2025229 | Tyr_Phospho_Site(381 -387) | | |
| 230 | 2025230 | 6E-1 9 >spJQ46948ITHIJECOLI 4-METHYL-5(B-HYDROXYETHYL)- | | |
| | | THIAZOLE MONOPHOSPHATE BIOSYNTHESIS ENZYME >giIl 100872 | | |
| | | (U34923) ThiJ [Escherichia coli]>9\|I 1773108 (U82664) 4-methyl-5(b- | | |
| | | hydroxyethyl)-thiazole monophosphate biosynthesis | | |
| 231 | 2025231 | 3E-60 >gi\|3193289 (AF069298) similar to several small proteins (-100 | | |
| | | aa) that are induced by heat, auxin, ethylene and wounding such as Phaseolus | | |
| | | aureus indole-3-acetic acid induced protein ARG (SW:32292) [Arabidopsi | | |
| 232 | 2025232 | Tyr_Phospho_Site(384-391) | | |
| 233 | 2025233 | 3E-55 >gbjAAD154321 (AC006218) nonspecific lipid-transfer protein | | |
| | | precursor [Arabidopsis thaliana]>g114726121 jgbjAAD2832l .1 1AC006436_12 | | |
| | | (AC006436) nonspecific lipid-transfer protein precursor [Arabidopsis thalianal | | |
| | | Length = 169 | | |
| 234 | 2025234 | 1 E-100 >embICAA66959I (X9831 5) peroxidase [Arabidopsis thaliana] | | |
| | | >gi 11429221 IembICAA673 I 3j (X98777) peroxidase ATP1 6a (Arabidopsis thaliana] | | |
| | | >giI44SS8O2jembjCAB37l 931 (AJ 133036) peroxidase [Arabidopsis thaliana] | | |
| | | Length = 352 | | |
| 235 | 2025235 | 5E-57 >gbIAADS5746.1 1AF0261671 (AF026167) ankyrin repeat protein EMB5O6 | | |
| | | [Arabidopsis thaliana]Length = 315 | | |
| 236 | 2025236 | 3′ RnpI (959-966) | | |
| 237 | 2025237 | 3′ 1E-44 >gij5689168Idbj\|BAA82843.1\|(AB023651) miraculin homologue | | |
| | | [Solanum melongena]Length = 160 | | |
| 238 | 2025238 | 5′ Pkc_Phospho_Site(26-28) | | |
| 239 | 2025239 | Tyr_Phospho_Site(52-59) | | |
| 240 | 2025240 | 1 E-71 >gi\|2213592 (AC000348) T7N9.12 [Arabidopsis thaliana]Length = | | |
| | | 553 | | |
| 241 | 2025241 | 1 E-1 12 >spjOO4l 3OJSERAARATH 0-3-PHOSPHOGLYCERATE | | |
| | | DEHYDROGENASE PRECURSOR (PGDH) >giI2I 89964Idb1IBAA204051 | | |
| | | (AB003280) Phosphoglycerate dehydrogenase [Arabidopsis thaliana] | | |
| | | >gi\|28042581dbj 1BAA244401 (ABO 10407) phosphoglycerate dehydrogenase | | |
| | | [Arabidopsis thaliana]Length = 624 | | |
| 242 | 2025242 | Tyr_Phospho_Site(599-606) | | |
| 243 | 2025243 | 3E-25 >gbIAAD49986.1 1AC008075 19 (AC008075) Similar to gbIAFO23472 | | |
| | | peptide transporter from Hordeum vulgare and is a member of the PF100854 | | |
| | | Peptide transporter family. ESTs gb1T41927 and gbIAA395024 come from this | | |
| | | gene. [Arabidops | | |
| 244 | 2025244 | 5E-29 >gi 12642157 (ACOO3000) ankyrin-like protein [Arabidopsis | | |
| | | thaliana]Length = 694 | | |
| 245 | 2025245 | 1 E-1 02 ) >spIQO2283IHAT5ARATH HOMEOBOX-LEUCINE ZIPPER | | |
| | | PROTEIN HATS (HD-ZIP PROTEIN 5) (HD-ZIP PROTEIN ATHB-1) | | |
| | | >gi\|996591pir1 ISi 6325 homeotic protein Athb-1 - Arabidopsis thaliana | | |
| | | >gi\|1 6329IembICAA4l 6251 (X58821) Athb-1 protein | | |
| 246 | 2025246 | 7E-74 >emblCAB3655O.1 I (AL035440) SNF8 like protein [Arabidopsis | | |
| | | thaliana]Length = 181 | | |
| 247 | 2025247 | Tyr_Phospho_Site(268-276) | | |
| 248 | 202S248 | 2E-91 >spl P25248 IACEABRANA ISOCITRATE LYASE (ISOC ITRASE) | | |
| | | (ISOCITRATASE) (ICL) >gi 16821 1 Ipir1lWZRPI isocitrate lyase (EC 4.1.3.1) - rape | | |
| | | >gi\|2552201bbs11 12862 isocitrate lyase, threo-D 5-isocitrate glyoxylate-lyase, IL | | |
| | | {EC 4.1.3.1}[Brassica napus, seedlings, Peptide, 576 aa]>giIl67l44 (L08482) | | |
| | | isocitrate lyase [Brassica napusi >gi 14471 42lprfl 1191 3424A isocitrate lyase | | |
| | | IBrassica napus]Length = 576 | | |
| 249 | 2025249 | 5E-90 >gbIAABS3I 01 .21 (U6821 9) catalase [Brassica napus]Length 492 | | |
| 250 | 2025250 | 3′ 3E-13 >gi\|1076634IpirIiS52578 protein-serine/threonine kinase NPK1S - | | |
| | | common tobacco >giISO5l 46ldbj 1BAA065381 (D31 737) protein-serine/threonine | | |
| | | kinase Nicotiana tabacum]Length = 422 | | |
| 251 | 2025251 | 3′ Pkc_Phospho_Site(4-6) | | |
| 252 | 2025252 | 5′ 5E-68 >gi\|45861 l6lembICAB4O9S2.1 I (AL049638) C-4 sterol methyl oxidase | | |
| | | [Arabidopsis thalianal Length = 303 | | |
| 253 | 2025253 | Tyr_Phospho_Site(318-324) | | |
| 254 | 2025254 | Tyr_Phospho_Site(350-358) | | |
| 255 | 2025255 | 3E-43 >dbiIBAA229401 (D45900) LEDI-3 protein [Lithospermum | | |
| | | erythrorhizonl Length = 201 | | |
| 256 | 2025256 | Pkc_Phospho_Site(1 3-15) | | |
| 257 | 2025257 | Pkc_Phospho_Site(1 6-18) | | |
| 258 | 2025258 | 2E-93 ) >gi\|1669387 (U41 998) actin 2 [Arabidopsis thaliana]Length = | | |
| | | 377 | | |
| 259 | 2025259 | 7E-50 >embICAB38952.1 I | (AL049171) ribosomal protein [Arabidopsis | |
| 260 | 2025260 | Tyr_Phospho_Site 517-523 | | |
| 261 | 2025261 | Tyr_Phospho_Site(55-62) | | |
| 262 | 2025262 | 1E-108 >embICABl 0398.11 (Z97340) cysteine proteinase like protein | | |
| 263 | 2025263 | 1E-74 >pirIlSl 9226 cold-regulated protein cor47 - Arabidopsis thaliana | | |
| | | (fragment) >gi\|388259jembICAA42483I (X59814) Cold and ABA regulated gene | | |
| | | [Arabidopsis thaliana]Length = 294 | | |
| 264 | 2025264 | 9E-65 >gi\|42051 15 (AF000521) cell wall invertase precursor [Fragaria x | | |
| | | ananassa]Length = 577 | | |
| 265 | 2025265 | 9E-40 >5pIP52424IPUR5_VIGUN | | |
| | | PHOSPHORIBOSYLFORMYLGLYCINAMIDIN E CYCLO-LIGASE PRECURSOR | | |
| | | (AIRS) (PHOSPHORIBOSYL-AMINOIMIDAZOLE SYNTHETASE) (AIR | | |
| | | SYNTHASE) >gi 1945060 (U30895) am inoimidazole ribonucleotide (Al RS) | | |
| | | synthetase [Vigna unguiculata]Length = 388 | | |
| 266 | 2025266 | 1 E-38 >dbjIBAA7579l .11 (AB017977) Aps2 [Arabidopsis thaliana]Length = | | |
| | | 96 | | |
| 267 | 2025267 | 2E-87 >embICAA23O33.1 I (AL035394) major latex protein [Arabidopsis | | |
| | | thaliana]Length = 151 | | |
| 268 | 2025268 | Tyr_Phospho_Site(931 -938) | | |
| 269 | 2025269 | SE-93 >embjCAB43643.1 I (ALOSO3SI) phenylalanyl-trna synthetase-like | | |
| | | protein [Arabidopsis thaliana]Length = 428 | | |
| 270 | 2025270 | 1 E-30 >gbjAAB8l 870 IAAB81 870 (AC002983) phosphoglyceride transfer | | |
| | | protein [Arabidopsis thaliana]Length 301 | | |
| 271 | 2025271 | 5E-59 ) >spIQ963I9IERW.ARATH ENHANCER OF RUDIMENTARY | | |
| | | HOMOLOG >gi\|1595812 (U67398) enhancer of rudimentary homolog ATER | | |
| | | [Arabidopsis thalianal Length = 109 | | |
| 272 | 2025272 | 7E-60 ) >gi\|3426037 (ACOOSI 68) ABC transporter protein [Arabidopsis | | |
| | | thaliana]Length = 1420 | | |
| 273 | 2025273 | 2E-14 >embICAB1 0269.11 (Z97337) hydroxyproline-rich glycoprotein | | |
| | | homolog [Arabidopsis thaliana]Length = 507 | | |
| 274 | 2025274 | 4E-28 >5pIP49597IP2C1_ARATH PROTEIN PHOSPHATASE 2C ABIl (PP2C) | | |
| | | >gij2129699\|pirjIA54588 protein phosphatase ABIl - Arabidopsis thaliana | | |
| | | >gijSO94l9IembICAA5S484l (X78886) ABII [Arabidopsis thalianal Length = 434 | | |
| 275 | 2025275 | Pkc_Phospho_Site(55-57) | | |
| 276 | 2025276 | Tyr_Phospho_Site 221-229 | | |
| 277 | 2025277 | Zinc Protease(1485-1494) | | |
| 278 | 2025278 | 3′ 2E-16 >gi\|5640155jemblCAB51557.lf (AJ242530) gibberellin response | | |
| 279 | 2025279 | lE-lOl >gi\|452470 (U05218) ATP sulfurylase [Arabidopsis thaliana] | | |
| 280 | 2025280 | 2E-80 >embICAB38935.1 (AL035709) phosphoenolpyruvate carboxykinase | | |
| 281 | 2025281 | IE-39 >embICAA749651 (Y14615) Importin alpha-like protein [Arabidopsis | | |
| 282 | 2025282 | Pkc PhosphoSite(32-34) | | |
| 283 | 2025283 | 1 E-38 >embICAA68l 9\|(X99938) RNA helicase [Arabidopsis thaliana] | | |
| | | Length = 671 | | |
| 284 | 2025284 | 9E-31 >gi\|974294 (U31309) LP6 [Pinus taeda]Length = 216 | | |
| 285 | 2025285 | Tyr_Phospho_Site(200-206) | | |
| 286 | 2025286 | 2E-38 >embjCABl6270.11 (Z99165) hypothetical zinc-finger protein | | |
| | | [Schizosaccharomyces pombel Length 425 | | |
| 287 | 2025287 | Tyr_Phospho_Site 1014-1021 | | |
| 288 | 2025288 | Tyr_Phospho_Site(981-988) | | |
| 289 | 2025289 | Tyr_Phospho_Site(55-63) | | |
| 290 | 2025290 | 5′ Pkc_Phospho_Site(12-14) | | |
| 291 | 2025291 | 1E-108 >gbIAAD4I43O.11AC007727_19 (AC007727) Similar to gb1Z11499 protein | | |
| | | disulfide isomerase from Medicago sativa. ESTs gbIAl099693, gb1R65226, | | |
| | | gbIAA657311, gbjT43068, gb1T42754, gbjTl4005, gb1T76445, gb\|H36733, | | |
| | | gbJT43168 and gbjT20649 come from t... Length = 501 | | |
| 292 | 2025292 | 2E-65 >embICAA67425I (X98925) stromal ascorbate peroxidase | | |
| | | [Arabidopsis thalianal Length 372 | | |
| 293 | 2025293 | 2E-93 >spIP23686IM ETKARATH S-AD ENOSYLMETHION IN E SYNTHETASE | | |
| | | 1 (METHIONINE ADENOSYLTRANSFERASE 1) (ADOMET SYNTHETASE 1) | | |
| | | >giI8l 647f pirlIJNOl 31 methionine adenosyltransferase (EC 2.5.1.6) - Arabidopsis | | |
| | | thaliana >gi\|166872 (M55077) 5-adenosylmethion me synthetase [Arabidopsis | | |
| | | thaliana]Length = 393 | | |
| 294 | 2025294 | 7E-35 >gbjAAD49969.1 1AC0080752 (AC008075) Contains similarity to | | |
| | | gbIAFI 14753 polytropic murine leukamia virus receptor SYGi from Mus | | |
| | | musculus. EST gb\|N96331 comes from this gene. [Arabidopsis thaliana]Length = | | |
| | | 873 | | |
| 295 | 2025295 | 3E-19 >gbIAAD1S482I (AC006266) glucosyltransferase [Arabidopsis | | |
| | | thaliana Len th 699 | | |
| 296 | 2025296 | Pkc PhosphoSite(26-28) | | |
| 297 | 2025297 | 1E-80) >embjCAB38935.1\| (AL035709) phosphoenolpyruvate | | |
| | | carboxykinase (ATP)-like protein [Arabidopsis thaliana]Length = 671 | | |
| 298 | 2025298 | SE-Si >dbjIBAA3Il43I (ABOI 091 5) responce regulatori [Arabidopsis | | |
| | | thaliana]>gi\|3323583 (AF057282) two-component response regulator homolog | | |
| | | [Arabidopsis thaliana]>gi\|3953597fdbj\|BAA34726\|(AB008487) response regulator | | |
| | | 4 | | |
| 299 | 2025299 | Tyr_Phospho_Site(140-147) | | |
| 300 | 2025300 | 5E-52 >pirIIS27OlO aminoacylase (EC 3.5.1.14)1 - pig | | |
| | | >giIl845fembjCAA48565j (X68564) aminoacylase I [Sus scrofa]Length = 406 | | |
| 301 | 2025301 | 3E-76 ) >dbjIBAA7484OI (AB007802) cytochrome b5 [Arabidopsis thalianal | | |
| | | Length = 140 | | |
| 302 | 2025302 | 2E-65 >pirIIS5l 697 oleoyl-[acyl-carrier-protein]hydrolase (EC 3.1.2.14) - | | |
| | | Arabidopsis thaliana >gij21295301pir1 1S69195 acyl-(acyl carrier protein) | | |
| | | thioesterase (clone TE 1-1) - Arabidopsis thaliana >giI634003jembICAA85387\| | | |
| | | (Z3691 0) acyl-(acyl carrier protein) thioesterase [Arabidopsis thalianal Length = | | |
| | | 412 | | |
| 303 | 2025303 | 3′ Tyr_Phospho_Site(474-482) | | |
| 304 | 2025304 | 3′ 7E-77 >gij5915829jsp10657871C7B6_ARATH CYTOCHROME P450 71B6 | | |
| | | >gij3164138(dbjjBAA28536j (D78604) cytochrome p450 monooxygenase | | |
| | | [Arabidopsis thaliana]>9114115378 (AC005967) cytochrome p450 monooxygenase | | |
| | | [Arabidopsis thaliana]Length 503 | | |
| 305 | 2025305 | Tyr_Phospho_Site(237-245) | | |
| 306 | 2025306 | 4E-49 >9113355468 (A00042 18) ribosomal protein L35 [Arabidopsis | | |
| | | thaliana]Length = 123 | | |
| 307 | 2025307 | 3E-22 >gb IAAC951 69.1 \| (AC005970) subtilisin-like protease [Arabidopsis | | |
| | | thalianal Length = 754 | | |
| 308 | 2025308 | 4E-57 >gb\|AAD1 7402 \| (AC006248) RING-H2 finger protein [Arabidopsis | | |
| | | thaliana]Length 204 | | |
| 309 | 2025309 | 9E-41 >embICAA655O21 (X96727) isocitrate dehydrogenase (NAD+) | | |
| | | [Nicotiana tabacum]Length = 364 | | |
| 310 | 2025310 | 9E-63 ) >gi\|21 04957 (U96924) immunophilin [Arabidopsis thalianal | | |
| | | Length = 112 | | |
| 311 | 2025311 | 1E-159 >gbIAAD23681.1\|AC006841_9 (AC006841) fructose biphosphate | | |
| | | aldolase [Arabidopsis thaliana]Length = 393 | | |
| 312 | 2025312 | 3′ Tyr_Phospho_Site(29-36) | | |
| 313 | 2025313 | 5′ 3E-18 >9111590814 (U52851) arginine decarboxylase [Arabidopsis | | |
| | | thalianal Length = 702 | | |
| 314 | 2025314 | 6E-44 >gij3033385 (AC004238) similar to Human XE169 protein | | |
| | | (escapes X-chromosome inactivation) [Arabidopsis thaliana]Length = 806 | | |
| 315 | 2025315 | Pkc_PhosphoSite(20-22) | | |
| 316 | 2025316 | 1E-104 >spIQ42569IC9O1ARATH CYTOONROME P450 90A1 | | |
| | | >911107631 51pirjjS55379 cytochrome P450 - Arabidopsis thaliana | | |
| | | >gi\|853719lemb1CAA607931 (X87367) CYP9O protein [Arabidopsis thaliana] | | |
| | | \|871 988(emb 1CAA607941 (X87368) CYP9O protein [Arabidopsis thaliana] | | |
| | | Length 472 | | |
| 317 | 2025317 | Pkc_Phospho_Site(54-56) | | |
| 318 | 2025318 | Tyr_Phospho_Site(489-496) | | |
| 319 | 2025319 | 4E-81 >spjP271 62ICAL1PETHY CALMODULIN I >gij7l 684IpirIIMCPZDC | | |
| | | calmodulin - carrot >giI478632jpirI\|S22971 calmodulin - trumpet lily | | |
| | | >911541 8391pir11S40301 calmodulin - Red bryony >giI2l 299701pir11S70768 | | |
| | | calmodulin CAM81 - garden petunia >gi\|18326jemb10AA42423l (X59751) | | |
| | | calmodulin [Daucus carotal >giIl9447iembICAA783Ol I (Zi 2839) calmodulin | | |
| | | [Lilium longiflorum]>gi\|169207 (M80836) calmodulin [Petunia hybridal >gij308900 | | |
| | | (Li 8912) calmodulin [Lilium longiflorumi >gijSOSl s4jemblCAA43l 43j (X60738) | | |
| | | Calmodulin [Malus domestica]>gi\|535444 (U13882) calmodulin [Pisum sativum] | | |
| | | >giI5825598Igb\|AAD5331 3.1 IAFi 780731 (AFi 78073) calmodulin 7 [Arabidopsis | | |
| | | thaliana >I 445602 if 1909349A calmodulin Daucus carota Len th = 149 | | |
| 320 | 2025320 | 7E-59 >emblCABlO267.1 I (Z97337) cytosolic O-acetylserine(thiol)lyase (EC | | |
| | | 4.2.99.8) [Arabidopsis thaliana]Length = 322 | | |
| 321 | 2025321 | 5E-12 >refjNP 006775.1 IPWDR3j WD repeat domain 3 | | |
| | | >gij5639663jgb1AAD45865.1 jAF08321 71 (AF08321 7) WD repeat protein WDR3 | | |
| | | [Homo sapiens]Length = 943 | | |
| 322 | 2025322 | Tyr_Phospho_Site(324-331) | | |
| 323 | 2025323 | 3E-65 >emblCAB43899.11 (AL078468) cellulose synthase catalytic subunit- | | |
| | | like protein [Arabidopsis thalianal Length = 689 | | |
| 324 | 2025324 | 1E-101) >embICAAl67l3.1I (AL021687) cytochrome P450 [Arabidopsis | | |
| | | thaliana]Length = 457 | | |
| 325 | 2025325 | 6E-46 >giI3l 76690 (AC003671) Similar to ubiquitin ligase gb1063905 | | |
| | | from S. cerevisiae. EST gb\|R65295 comes from this gene. [Arabidopsis thaliana] | | |
| | | Length = 1126 | | |
| 326 | 2025326 | 1E-109 >gb\|AAB70445I (AC000104) Arabidopsis thaliana ethylene | | |
| | | receptor (ERS2) gene (gbjAF047976). EST gb\|W43451 comes from this gene. | | |
| | | [Arabidopsis thaliana]>gi\|3687656 (AF047976) ethylene receptor; ERS2 | | |
| | | [Arabidopsis thaliana]Length = 645 | | |
| 327 | 2025327 | 2E-76 >5pIP49637IRL2A_ARATH 60S RIBOSOMAL PROTEIN L27A | | |
| | | >gi\|2129719IpirjjS71256 ribosomal protein L27a - Arabidopsis thaliana | | |
| | | >gi\|11074871emb1CAA630251 (X91959) 60S ribosomal protein L27a [Arabidopsis | | |
| | | thaliana]>gi 61751 50 jgb\|AAF04877. 1 IACQI 0796_13 (ACOl 0796) 60S ribosomal | | |
| | | protein L27A [Arabidopsis thaliana]Length = 146 | | |
| 328 | 2025328 | Tyr_Phospho_Site(1 098-1105) | | |
| 329 | 2025329 | 1E-142 >spIO0442OIURIC_ARATH URICASE (URATE OXIDASE) (NODULIN | | |
| | | 35 HOMOLOG) >gi\|2208944IembjCAA72005I (Y11120) nodulin-35 homologue | | |
| | | [Arabidopsis thalianall Length = 309 | | |
| 330 | 2025330 | 1E-124 >embjCAB389O8.1 I (AL035708) cytochrome P450-like protein | | |
| | | Arabido sis thaliana Length = 541 | | |
| 331 | 2025331 | Tyr_Phospho_Site(344-35O) | | |
| 332 | 2025332 | 3E-56 >gbjAAD2l762.1 j | (AC006569) photosystem I reaction center | |
| | | subunit IV precursor [Arabidopsis thalianal >gi\|5732205jemb\|CAB52679.1 I | | |
| | | (AJ245909) photosystem I subunit IV precursor [Arabidopsis thaliana]Length = | | |
| | | 145 | | |
| 333 | 2025333 | 3′ 6E-47 >gi\|3806098 (AF0791 00) arginine-tRNA-prOtein transferase | | |
| | | 1; Atel p [Arabidopsis thaliana]Length = 629 | | |
| 334 | 2025334 | 5′ Pkc_Phospho_Site(31 9-321) | | |
| 335 | 2025335 | 1E-91 >spIP46875IKATC_ARATH KINESIN-LIKE PROTEIN C | | |
| | | >gij1084342jpiri1548020 kinesin-related protein katO - Arabidopsis thaliana | | |
| | | >gi\|14388441dbjlBAA046741 (021138) heavy chain polypeptide of kinesin-like | | |
| | | protein [Arabidopsis thalianal Length = 754 | | |
| 336 | 2025336 | 8E-36 >spIQOO8O8IHETI_PODAN VEGETATIBLE INCOMPATIBILITY | | |
| | | PROTEIN HET-E-1 >gi\|607003 (L281 25) beta transducin-Iike protein [Podospora | | |
| | | anserinal Length 1356 | | |
| 337 | 2025337 | Pkc_Phospho_Site(1 6-18) | | |
| 338 | 2025338 | 2E-44 >embICAAO6667.1 I (AJ005671) cytochrome b6f complex subunit | | |
| | | [Arabidopsis thaliana]Length = 96 | | |
| 339 | 2025339 | 9E-40 >spjP52836jF3ST_FLACH FLAVONOL 3-SULFOTRANSFERASE (F3- | | |
| | | ST) >gi\|285285\|pirIIB4021 6 flavonol 3′ -sulfotransferase - Flaveria chloraefolia | | |
| | | Length = 311 | | |
| 340 | 2025340 | 4E-94 >gi\|4056432 (AC005990) Similar to gi\|2245014 | | |
| | | glucosyltransferase homolog from Arabidopsis thaliana chromosome 4 contig | | |
| | | gbjZ97341. ESTs gb\|T20778 and gbIAA586281 come from this gene. [Arabidopsis | | |
| | | thaliana]Length = 448 | | |
| 341 | 2025341 | 9E-21 >gi\|488189 (U00063) weakly similar to R. rickettsii protein P34 | | |
| | | [Caenorhabditis elegansi Length = 435 | | |
| 342 | 2025342 | Pkc_PhosphoSite(200-202) | | |
| 343 | 2025343 | 1 E-49 >gi\|2642434 (AC002391) Reri protein [Arabidopsis thaliana] | | |
| | | Length = 211 | | |
| 344 | 2025344 | 2E-1 6 >gb\|AAD24653.1 1AC0062209 (AC006220) glycine rich protein | | |
| | | [Arabidopsis thaliana]Length = 135 | | |
| 345 | 2025345 | 3′ 4E-43 >gi\|4559380lgbfAA023040.1 1AC0065265 (AC006526) auxin- | | |
| | | responsive GH3 protein (Arabidopsis thalianaj Length = 576 | | |
| 346 | 2025346 | 3E-57 >gij3482923 | (AC003970) Highly similar to cinnamyl alcohol | |
| | | dehydrogenase, gi\|l 143445 [Arabidopsis thaliana]Length = 322 | | |
| 347 | 2025347 | Pkc_Phospho_Site(41-43) | | |
| 348 | 2025348 | 2E-71 >gij3004563 (AC003673) similar to APG (non proline-rich region) | | |
| | | [Arabidopsis thaliana]>gi 31 76703 (AC002392) proline-rich protein APG | | |
| | | [Arabidopsis thaliana]Length = 344 | | |
| 349 | 2025349 | 4E-66 >gij3152581 (AC002986) Similar to E. coli sulfurtransferase | | |
| | | (rhodanese) gbIAEOO338. ESTs gb1T03984, gb1T03983 and gb1W43228 come | | |
| | | from this gene. [Arabidopsis thaliana]>gij5834508\|emb\|CAB55306.1 (AJOI 1045) | | |
| | | thiosulfate sulfurtransferase [Arabidopsis thaliana]>gi\|6009981 jdbj IBAA851 48.11 | | |
| | | (AB032864) mercaptopyruvate sulfurtransferase lArabidopsis thalianal Length = | | |
| | | 379 | | |
| 350 | 2025350 | Pkc_PhosphoSite(5-7) | | |
| 351 | 2025351 | 3E-71) >embICAB5365IAI (AL110123) ribosomal protein L32-like protein | | |
| | | [Arabidopsis thaliana]Length = 133 | | |
| 352 | 2025352 | 1E-136 >gbIAADO2499I (AF049870) thaumatin-like protein [Arabidopsis | | |
| | | thaliana]Length = 253 | | |
| 353 | 2025353 | 9E-78) >dbjlBAA28828I (AB015313) MAP kinase kinase 2 [Arabidopsis | | |
| 354 | 2025354 | Tyr_Phospho_Site(720-727) | | |
| 355 | 2025355 | Tyr_Phospho_Site(647-654) | | |
| 356 | 2025356 | 1E-105 >gij4 102703 (AF015274) ribulose-5-phosphate-3-epimerase | | |
| | | [Arabidopsis thaliana]Length = 281 | | |
| 357 | 2025357 | 1E-100 >gi\|1657617 (U72503) G2p [Arabidopsis thaliana]>gij3068707 | | |
| | | (AF049236) nuclear DNA-binding protein G2p [Arabidopsis thaliana]Length = 392 | | |
| 358 | 2025358 | Tyr_Phospho_Site(391 -398) | | |
| 359 | 2025359 | 3′ 4E-39 >giI3643085Igb\|AAC36698f (AF075580) protein phosphatase-2C; | | |
| | | PP2C [Mesembryanthemum crystallinum]Length = 359 | | |
| 360 | 2025360 | 3′ Tyr_Phospho_Site(776-782) | | |
| 361 | 2025361 | 5′ Tyr_Phospho_Site(94-102) | | |
| 362 | 2025362 | Pkc_Phospho_Site(50-52) | | |
| 363 | 2025363 | 2E-29 >embICABlO321.11 (Z97338) UFD1 like protein [Arabidopsis thaliana] | | |
| | | Length = 778 | | |
| 364 | 2025364 | 2E-57 >gi\|3337361 (AC004481) ankyrin-like protein [Arabidopsis | | |
| | | thaliana]Length = 770 | | |
| 365 | 2025365 | 1 E-108 >gbIAAD3O2S4.1 1AC007296_15 (AC007296) Strong similarity to | | |
| | | gblU74319 obtusifoliol 14-alpha demethylase (CYPSI) from Sorghum bicolor and | | |
| | | is a member of the PF100067 cytochrome P450 family. ESTs gblAA72O3O, | | |
| | | gblN65031 and gbIAA | | |
| 366 | 2025366 | 5E-34 >emb(CAA1 8841 .11 (AL023094) ribosomal protein S16 [Arabidopsis | | |
| | | thaliana]Length = 113 | | |
| 367 | 2025367 | 1E-65) >gi\|1905876 (U90879) biotin carboxylase subunit [Arabidopsis | | |
| | | thaliana]>gi\|1916300 (U9 1414) heteromeric acetyl-CoA carboxylase biotin | | |
| | | carboxylase subunit [Arabidopsis thaliana]>gi 13047099 (AF058826) Arabidopsis | | |
| | | thaliana biotin carboxylase subunit (GB:U90879) [Arabidopsis thaliana]Length = | | |
| | | 537 | | |
| 368 | 2025368 | 1E-103 >sp 1P54887jP5C 1 ARATH DELTA I -PYRROLINE-5-CARBOXYLATE | | |
| | | SYNTHETASE A (P5CS A) [INCLUDES: GLUTAMATE 5-KINASE (GAMMA- | | |
| | | GLUTAMYL KINASE) (GK); GAMMA-GLUTAMYL PHOSPHATE REDUCTASE | | |
| | | (GPR) (GLUTAMATE-5-SEMIALDEHYDE DEHYDROGENASE) (GLUTAMYL | | |
| | | GAMMA-SEM IALD E... >gi 121 295721 pin 1566637 delta-I -pyrrol ine-5-carboxylate | | |
| | | synthetase - Arabidopsis thaliana >gi\|829100jembICAA60740I (X87330) pyrroline- | | |
| | | 5-carboxylate synthetase [Arabidopsis thaliana]>gi l870866lemblCAA60446 I | | |
| | | (X86777) pyrrol ine-5-carboxylate synthetase A [Arabidopsis thaliana] | | |
| | | >gi\|1041 248lemblCAA6l 593j (X894 14) pyrroline-5-carboxylate synthase | | |
| | | [Arabidopsis thaliana]>gi\|26421 62 (AC003000) delta-i -pyrroline 5-carboxylase | | |
| | | synthetase, P5C1 [Arabidopsis thaliana]Length 717 | | |
| 369 | 2025369 | 1 E-43 >pirIIJUOl 82 monodehydroascorbate reductase (NADH) (EC | | |
| | | 1.6.5.4) - cucumber >gij452165\|dbj\|BAA05408j (D26392) monodehydroascorbate | | |
| | | reductase [Cucumis sativus]Length = 434 | | |
| 370 | 2025370 | 1 E-36 >giIl 669387 (U41 998) actin 2 [Arabidopsis thalianal Length = 377 | | |
| 371 | 2025371 | 2E-39 >sp1Q42351 1RL34_ARATH 60S RIBOSOMAL PROTEIN L34 | | |
| | | >gij4262177jgbjAAD14494i (ACOOSSO8) 23552 [Arabidopsis thaliana]Length = | | |
| | | 120 | | |
| 372 | 2025372 | 1 E-52 >embjCAAl 65521 (ALO21 635) HSP associated protein like | | |
| | | [Arabidopsis thalianal Length = 627 | | |
| 373 | 2025373 | Tyr_Phospho_Site(1431-1438) | | |
| 374 | 2025374 | Tyr_Phospho_Site(347-354) | | |
| 375 | 2025375 | 5E-29 >emblCAA6734l I (X98809) peroxidase ATP5a [Arabidopsis | | |
| | | thalianal Length = 350 | | |
| 376 | 2025376 | Tyr_Phospho_Site(1514-1521) | | |
| 377 | 2025377 | 1 E-66 >pir1l533612 isocitrate dehydrogenase - soybean Length = 451 | | |
| 378 | 2025378 | 2E-15 >gb\|AAD24393.1IAC00608195 (AC006081) zinc finger protein | | |
| 379 | 2025379 | 6E-74 >embICAA7O946I (Y09817) Ca2+-ATPase [Arabidopsis thaliana] | | |
| 380 | 2025380 | 3′ Pkc_Phospho_Site(12-14) | | |
| 381 | 2025381 | 5′ Pkc_Phospho_Site(152-154) | | |
| 382 | 2025382 | 3E-67 >giI3l 50402(ACOO41 65) malonyl-CoA:ACyl carrier protein | | |
| 383 | 2025383 | 3E-83 >gi\|31 35261(AC003058) 18.5 KDa class I heat shock protein | | |
| 384 | 2025384 | 1 E-121 >embICAB45447.11 (AL079347) invertase-like protein [Arabidopsis | | |
| | | thaliana] Length = 571 | | |
| 385 | 2025385 | 9E-36 >9114056460 (AC005990) Contains similarity to gbIL26505 Met3Op | | |
| | | from Saccharomyces cerevisiae. ESTs gbIFl4l33, gbIT46217, gbiAA404758 and | | |
| | | gb\|Z37647 come from this gene. [Arabidopsis thaliana]Length = 475 | | |
| 386 | 2025386 | 5E-23 >gbjAAC27O73.1 I (AF067858) embryo-specific protein 3 | | |
| | | [Arabidopsis thaliana]Length = 213 | | |
| 387 | 2025387 | 2E-33 >embICABlO3O9.1 I (Z97338) cytochrome P450 like protein | | |
| | | [Arabidopsis thaliana]Length = 487 | | |
| 388 | 2025388 | 4E-46 >spIQ3941 1 1RL26_BRARA 60S RIBOSOMAL PROTEIN L26 | | |
| | | >gi\|2160300idbjIBAA1 89411 (D78495) ribosomal protein [Brassica rapa]Length = | | |
| | | 146 | | |
| 389 | 2025389 | 1E-102 >embICAB45O74.1I (AL078637) transport inhibitor response-like | | |
| | | protein [Arabidopsis thalianal Length = 614 | | |
| 390 | 2025390 | 2E-73 ) >emblCAB37456.1 j (AL035526) shaggy-like protein kinase etha (EC | | |
| | | 2.7.1 .-) [Arabidopsis thaliana]Length = 380 | | |
| 391 | 2025391 | 1E-101) >pinIIS7l273 lamin - Arabidopsis thaliana | | |
| | | >gi\|1262754\|embICAA65750I (X97023) lamin [Arabidopsis thaliana]>gi\|3395760 | | |
| | | (U77721) unknown [Arabidopsis thaliana]Length = 172 | | |
| 392 | 2025392 | 2E-46 >spIP46687IGAS3_ARATH GIBBERELLIN-REGULATED PROTEIN 3 | | |
| | | PRECURSOR >gi\|2129590ipinIiS60231 GASTi protein homolog (clone GASA3) - | | |
| | | Arabidopsis thaliana >gi\|887935 (U11764) GASTI protein homolog [Arabidopsis | | |
| | | thaliana] >gi\|5916443\|gbIAAD55954.1 1AC007633 3 (AC007633) giberellin | | |
| | | regulated protein GASA3 precursor [Arabidopsis thaliana]Length = 99 | | |
| 393 | 2025393 | 2E-92 >spIP139Q5IEF1A ARATH ELONGATION FACTOR 1-ALPHA (EF-1- | | |
| | | ALPHA) >gi\|81 6O6IpirI jS06724 translation elongation factor eEF-1 alpha chain - | | |
| | | Arabidopsis thaliana >gi\|2957881emb10AA344531 (X16430) elongation factor 1- | | |
| | | alpha [Arabidopsis thalianal >gi\|1369927\|embjCAA34454l (XI 6431) elongation | | |
| | | factor 1-alpha [Arabidopsis thalianal >gi\|1369928IembiCAA34455I (Xl 6431) | | |
| | | elongation factor 1-alpha [Arabidopsis thaliana]>gi\|1532172 (U63815) EF-lalpha | | |
| 394 | 2025394 | Pkc_PhosphoSite(44-46) | | |
| 395 | 2025395 | 6E-64 >9113851559 (AF084829) methyl chloride transferase [Batis | | |
| | | transferase [Batis maritima]Length = 230 | | |
| 396 | 2025396 | 5′ Pkc_Phospho_Site(47-49) | | |
| 397 | 20253975E-56 >gij3337352 (AC004481) chromatin structural protein Suptshp | | | |
| | | [Arabidopsis thaliana]Length = 990 | | |
| 398 | 2025398 | 1E-37 >9b1AAD34676.11AC00634t.4 (AC006341) Similar to gbIYl2Ol4 RAD23 | | |
| | | protein isoform II from Daucus carota. This gene is probably cut off. EST | | |
| | | gbIAA651284 comes from this gene. [Arabidopsis thalianal Length = 113 | | |
| 399 | 2025399 | Pkc_PhosphoSite(111-113) | | |
| 400 | 2025400lE-lOl >gi\|3193316(AF069299) contains similarity to nucleotide sugar | | | |
| | | epimerases [Arabidopsis thaliana]Length = 430 | | |
| 401 | 2025401 | TyrPhosphQ.5ite(88-95) | | |
| 402 | 2025402 | 3E-40 >gi\|3329368 (AF031244) nodulin-like protein [Arabidopsis | | |
| | | thaliana]Length = 559 | | |
| 403 | 2025403 | 6E-57 >spIP34O91IRL6_MESCR60S RIBOSOMAL PROTEIN L6 (YL1 6-LIKE) | | |
| | | >gi\|2803741pir11S28586 ribosomal protein ML16 - common ice plant | | |
| | | >gi 119539 lemblCAA49 1751 (X69378) ribosomal protein YL1 6 | | |
| | | [Mesembryanthemum crystallinum]Length = 234 | | |
| 404 | 2025404 | Tyr_Phospho_Site(998-1 006) | | |
| 405 | 2025405 | 3E-50 >gi\|2462763 (AC002292) Highly similar to auxin-induced protein | | |
| | | (aldo/keto reductase family) [Arabidopsis thaliana]Length = 342 | | |
| 406 | 2025406 | 1E-35 >spIP32I32ITYPA_ECOLI GTP-BINDING PROTEIN TYPAJBIPA | | |
| | | (TYROSINE PHOSPHORYLATED PROTEIN A) >gij62873SIpiri 1540816 | | |
| | | hypothetical protein o591 - Escherichia coli >gij304976 (Li 9201) matches | | |
| | | PSOOO17: ATP_GTP_A and PS00301: EFACTOR_GTP; similar to elongation | | |
| | | factor G, TetMITetO tetracycline-resistance proteins [Escherichia coli]>gi\|1790302 | | |
| | | (AE000462) GTP-binding factor [Escherichia coli]Length = 591 | | |
| 407 | 2025407 | Tyr_Phospho_Site(425-432) | | |
| 408 | 2025408 | 7E-25 >emblCAB4l72l.1I (AL049730) pEARLI 1-like protein [Arabidopsis | | |
| | | thaliana]>gi\|4725951jembICAB41722.1l (AL049730) pEARLI 1-like protein | | |
| | | [Arabidopsis thaliana]Length = 129 | | |
| 409 | 2025409 | Pkc_Phospho_Site(1 8-20) | | |
| 410 | 2025410 | Tyr_Phospho_Site(652-659) | | |
| 411 | 2025411 | 3′ Pkc_Phospho_Site(21-23) | | |
| 412 | 2025412 | 5′ Tyr_Phospho_Site(283-290) | | |
| 413 | 2025413 | 5′ Tyr_Phospho_Site(901-908) | | |
| 414 | 2025414 | Pkc_Phospho_Site(2-4) | | |
| 415 | 2025415 | 1E-120 >sp\|P46645\|AAT2ARATH ASPARTATE AMINOTRANSFERASE, | | |
| | | CYTOPLASMIC ISOZYME 1 (TRANSAMINASE A) >g\|693690 (U15033) | | |
| | | aspartate aminotransferase [Arabidopsis thaliana]Length = 405 | | |
| 416 | 2025416 | 3E-68 >emb\|CAA74051 \| (Y1 3723) Transcription factor [Arabidopsis | | |
| | | thalianal Length = 141 | | |
| 417 | 2025417 | 7E-89 >splP46267lF1 60 BRANA FRUCTOSE-1,6-BISPHOSPHATASE | | |
| | | CYTOSOLIC (D-FRUCTOSE-1,6-BISPHOSPHATE \|-PHOSPHOHYDROLASE) | | |
| | | (FBPASE) >gi\|885894 (U20179) fructose 1,6-bisphosphatase [Brassica napus] | | |
| | | Length 339 | | |
| 418 | 2025418 | Rgd(688-690) | | |
| 419 | 2025419 | 4E-13 >gbjAAD3l375.11AC006053.j7 (AC006053) proton phosphatase | | |
| | | [Arabidopsis thaliana]Length = 392 | | |
| 420 | 2025420 | 4E-37 >emblCAB4l7l6.1l | (AL049730) SWHI protein [Arabidopsis thalianal | |
| | | Length 694 | | |
| 421 | 2025421 | Tyr_Phospho_Site (256-263) | | |
| 422 | 2025422 | 3E-86 >gbIAAC24833I (AFO6I 520) copper/zinc superoxide dismutase | | |
| | | [Arabidopsis thalianal Length = 162 | | |
| 423 | 2025423 | 8E-56 >pirll556707 histone H3 homolog - common tobacco Length = 136 | | |
| 424 | 2025424 | 1E-98 >spl02206015P51_CITUN SUCROSE-PHOSPHATE SYNTHASE 1 | | |
| | | (UDP-GLUCOSE-FRUCTOSE-PHOSPHATE GLUCOSYLTRANSFERASE 1) | | |
| | | j25888881dbj \| BAA232 131 (AB005023) sucrose-phosphate synthase [Citrus | | |
| | | unshiul Length = 1057 | | |
| 425 | 2025425 | 3E-14 >gb\|AAC32439.11 (AC004786) serine carboxypeptidase I | | |
| | | Arabido sis thaliana Len th 435 | | |
| 426 | 2025426 | 3E-85 >gb\|AAC3631 8.11 (AF053127) leucine-rich receptor-like protein | | |
| | | kinase [Malus domestical Length = 999 | | |
| 427 | 2025427 | 4E-71 >embICAB39787.1 I (AL049488) chlorophyll a/b-binding protein-like | | |
| | | [Arabidopsis thalianal >g\|14741 958\|9b1AAD28776. 1 \|AF\|341291 (AF 134129) | | |
| | | Lhcb5 protein [Arabidopsis thaliana]Length = 280 | | |
| 428 | 2025428 | 1E-105>sp\|P19456\|PMA2_ARATH PLASMAMEMBRANEATPASE2 | | |
| | | (PROTON PUMP) >g\|67973jpir\|\|PXMUP2 H+-transporting ATPase (EC 3.6.1.35) | | |
| | | type 2, plasma membrane - Arabidopsis thaliana >gi\|166629 (J05570) H+-ATPase | | |
| | | [Arabidopsis thalianal >gi\|5730129IembICAB52463.1 I (AL109796) H+-transporting | | |
| | | ATPase type 2, plasma membrane [Arabidopsis thalianal Length = 948 | | |
| 429 | 2025429 | Tyr_Phospho_Site(35-43) | | |
| 430 | 2025430 | Tyr_Phospho_Site(772-780) | | |
| 431 | 2025431 | 3′ IE-104 >gi\|2146742jpirIIS65572 pattern-formation protein GNOM - | | |
| | | Arabidopsis thaliana >gi\|1209631 (U36432) GNOM gene product [Arabidopsis | | |
| | | thaliana]Length = 1451 | | |
| 432 | 2025432 | 3′ 3E-66 >gij2244819IembiCABl 0242.11 (Z97336) germin precursor oxalate | | |
| | | oxidase [Arabidopsis thaliana]Length = 222 | | |
| 433 | 2025433 | Tyr_Phospho_Site(330-337) | | |
| 434 | 2025434 | 2E-33 >5pIO23095IRLA1 ARATH 60S ACIDIC RIBOSOMAL PROTEIN P1 | | |
| | | >gi\|2252857 (AF013294) similar to acidic ribosomal protein pl [Arabidopsis | | |
| | | thaliana]Length = 110 | | |
| 435 | 2025435 | Tyr_Phospho_Site(1062-1069) | | |
| 436 | 2025436 | Tyr_Phospho_Site(1166-1173) | | |
| 437 | 2025437 | T r Phos ho Site 1176-1184 | | |
| 438 | 2025438 | Zinc Finger C2h2(279-300) | | |
| 439 | 2025439 | Tyr_Phospho_Site(619-626) | | |
| 440 | 2025440 | 5′ 4E-96 >giIl 502430 (U62331) phosphate transporter [Arabidopsis | | |
| | | thaliana]>gij2564661 (AF022872) phosphate transporter [Arabidopsis thaliana] | | |
| | | >gi 13869206idbj 1BAA343981 (ABO 16166) Phosphate Transporter 4 [Arabidopsis | | |
| | | thaliana]>giI3928081 (AC005770) phosphate transporter, AtPT2 | | |
| 441 | 2025441 | 5′ T r Phos ho Site 262-269 | | |
| 442 | 2025442 | 5′ Rgd(475-477) | | |
| 443 | 2025443 | Tyr_Phospho_Site(800-808) | | |
| 444 | 2025444 | 1 E-61 >giI2l 91131 (AF007269) A_1G002N01 .8 gene product | | |
| | | [Arabidopsis thaliana]Length = 444 | | |
| 445 | 2025445 | 7E-74 >embICAA711O31 (Y09987) CDSP32 protein (Chioroplast Drought- | | |
| | | induced Stress Protein of 32kDa) [Solanum tuberosum]Length = 296 | | |
| 446 | 2025446 | 1 E-1 19 >dbjIBAA84437.1 I (AP000423) NADH dehydrogenase ND4 | | |
| | | [Arabidopsis thaliana]Length = 506 | | |
| 447 | 2025447 | 4E-16 >embjCAAl 8840.1 I (AL023094) Homeodomain-like protein | | |
| 448 | 2025448 | Pkc_Phospho_Site(90-92) | | |
| 449 | 2025449 | Pkc_Phospho_Site(40-42) | | |
| 450 | 2025450 | T r Phos ho Site 1144-1152 | | |
| 451 | 2025451 | 2E-67 >spjQ40082jXYLAHORVU XYLOSE I SOM ERASE | | |
| | | >gi\|2130052Ipirj j565467 xylose isomerase (EC 5.3.1.5) - barley | | |
| | | >gi I 1296809 IembICAA64545I (X95257) xylose isomerase [Hordeum vulgare] | | |
| | | Length = 479 | | |
| 452 | 2025452 | Pkc_Phospho_Site(31 -33) | | |
| 453 | 2025453 | 3′ 7E-63 >gi\|586036jsp\|P37106ISR51_ARATH SIGNAL RECOGNITION | | |
| | | PARTICLE 54 KD PROTEIN I (SRP54) >gi\|629560IpirIIS42550 signal recognition | | |
| | | particle 54K protein - Arabidopsis thaliana >gi\|3O41 11 (Li 9997) signal recognition | | |
| | | particle 54 kDa subunit [Arabidopsis thalianal >giISl 03829IgbIAAD39659.1 ACO | | |
| 454 | 2025454 | 5′ Tyr_Phospho_Site(307-31 5) | | |
| 455 | 2025455 | 4E-79 >giI3l 57931 (AC002131) Similar to pyrophosphate-dependent | | |
| | | phosphofuctokinase beta subunit gb1Z32850 from Ricinus communis. ESTs | | |
| | | gb1N65773, gb1N64925 and gb1F15232 come from this gene. [Arabidopsis | | |
| | | thaliana]Length = 574 | | |
| 456 | 2025456 | 9E-70 >gi\|1669387 (U41 998) actin 2 [Arabidopsis thaliana]Length = 377 | | |
| 457 | 2025457 | Tyr_Phospho_Site(43-50) | | |
| 458 | 2025458 | 2E-25 >spIP54I2IIAIG2_ARATH AIG2 PROTEIN >gij1127806 (U40857) AIG2 | | |
| | | [Arabidopsis thalianal Length = 170 | | |
| 459 | 2025459 | 1 E-32 >g113377850 (AF076274) contains simlarity to Canis familiaris | | |
| | | signal peptidase complex 25 kDa subunit (GB:U12687) [Arabidopsis thaliana] | | |
| | | Length = 125 | | |
| 460 | 2025460 | Pkc_PhosphoSite(24-26) | | |
| 461 | 2025461 | 1E-120 >gi\|3108209 (AF028809) eukaryotic cap-binding protein | | |
| | | [Arabidopsis thaliana]Length 221 | | |
| 462 | 2025462 | Tyr_Phospho_Site(711-718) | | |
| 463 | 2025463 | 5′ Pkc_Phospho_Site(37-39) | | |
| 464 | 2025464 | Pkc_Phospho_Site(26-28) | | |
| 465 | 2025465 | Tyr_Phospho_Site(1 3-19) | | |
| 466 | 2025466 | Tyr_Phospho_Site(21 1-219) | | |
| 467 | 2025467 | Tyr_Phospho_Site(726-733) | | |
| 468 | 2025468 | 2E-90 >giI3l 28180 (AC004521) citrate synthetase [Arabidopsis thaliana] | | |
| | | Length = 474 | | |
| 469 | 2025469 | 6E-94 >gbjAAD35003.1 1AF1443859 (AF144385) thioredoxin fi [Arabidopsis | | |
| | | thaliana]Length = 178 | | |
| 470 | 2025470 | 1E-128 >gbIAAD2S546.1 1AC0058509 (AC005850) protein kinase [Arabidopsis | | |
| | | thaliana]Length = 424 | | |
| 471 | 2025471 | 7E-81 >spIQ43644INUAM_SOLTU NADH-UBIQUINONE OXIDOREDUCTASE | | |
| | | 75 KD SUBUNIT PRECURSOR (COMPLEX I-75KD) (CI-75KD) (76 KD | | |
| | | MITOCHONDRIAL COMPLEX I SUBUNIT) >gi\|1084434IpirI 1S52737 NADH | | |
| | | dehydrogenase (ubiquinone) (EC 1.6.5.3) 76K chain precursor - potato | | |
| | | >gi\|758340IembICAA59818i (X85808) 76 kDa mitochondrial complex I subunit | | |
| [Solanum tuberosum]Length = 738 | | | | |
| 472 | 2025472 | IE-101) >pir11556718 protein kinase 1-Arabidopsis thaliana >gi\|166817 | | |
| | | (L05561) protein kinase [Arabidopsis thaliana]Length = 362 | | |
| 473 | 2025473 | 8E-47 >gbIAAD2364O.1 1AC0071 196 (AC0071 19) unknown protein [Arabidopsis | | |
| | | thalianal Length = 101 | | |
| 474 | 2025474 | 4E-64 ) >spIP53665IACPM_ARATH ACYL CARRIER PROTEIN, | | |
| | | MITOCHONDRIAL PRECURSOR (ACP) (NADH-UBIQUINONE | | |
| | | OXIDOREDUCTASE 9.6 KD SUBUNIT) (MTACP-1) >gi\|903689 (L23574) acyl | | |
| | | carrier protein precursor [Arabidopsis thaliana]>gi\|3341 682 | | |
| 475 | 2025475 | Tyr_Phospho_Site(1 275-1282) | | |
| 476 | 2025476 | 7E-80 ) >gi\|41 85515 (AFi 02824) actin depolymerizing factor 6 | | |
| | | [Arabidopsis thalianal >gi\|6007773IgbIAAF01 035.1 1AF183576 1 (AF183576) actin | | |
| | | depolymerizing factor 6 [Arabidopsis thalianal Length = 146 | | |
| 477 | 2025477 | Tyr_Phospho_Site(1 113-1120) | | |
| 478 | 2025478 | 6E-65 >spIP49O78IASNS_ARATH ASPARAGINE SYNTHETASE | | |
| | | [GLUTAMINE-HYDROLYZING](GLUTAMINE-DEPENDENT ASPARAGINE | | |
| | | SYNTHETASE) >gij507946 (L29083) glutamine-dependent asparagine synthetase | | |
| | | [Arabidopsis thaliana]>gi\|5541 701 lembiCABsi 206.11 (AL096860) glutamine- | | |
| | | dependent asparagine synthetase [Arabidopsis thaliana]Length = 584 | | |
| 479 | 2025479 | 7E-18 >embjCAB10394.11 (Z97340) transcription factor like protein | | |
| | | [Arabidopsis thalianal Length = 954 | | |
| 480 | 2025480 | Tyr_Phospho_Site(75-83) | | |
| 481 | 2025481 | Tyr_Phospho_Site(1220-1227) | | |
| 482 | 2025482 | 2E-24 >gij4050087 (AFi 09907) S164 [Homo sapiens]Length = 735 | | |
| 483 | 2025483 | Tyr_Phospho_Site(632-639) | | |
| 484 | 2025484 | Tyr_Phospho_Site(662-668) | | |
| 485 | 2025485 | 1 E-92 >gi\|2459446 (AC002332) cinnamoyl-CoA reductase [Arabidopsis | | |
| | | thaliana]Length = 321 | | |
| 486 | 2025486 | 3E-42 >9b1AAD56335.1 1AC00932Q22 (AC009326) 60S acidic ribosomal protein, | | |
| | | 5′ partial [Arabidopsis thalianal Length = 230 | | |
| 487 | 2025487 | 3′ Tyr_Phospho_Site(674-681) | | |
| 488 | 2025488 | Zinc Finger C2h2(644-666) | | |
| 489 | 2025489 | Pkc_Phospho_Site(33-35) | | |
| 490 | 2025490 | 8E-81 >gb\|AAD49991 .1 1AC007259A (AC007259) Highly similar to Mb proteins | | |
| | | [Arabidopsis thalianal Length = 573 | | |
| 491 | 2025491 | 1E-1 19 >gi\|3859599 (AF104919) similar to class I chitinases (Pfam: | | |
| | | PF00182, E = 1.2e-142, N = 1) [Arabidopsis thaliana]Length = 280 | | |
| 492 | 2025492 | 9E-70 >giI4l 91785 (AC00591 7) hydrolase [Arabidopsis thaliana]Length | | |
| | | = 332 | | |
| 493 | 2025493 | Pkc_PhosphoSite(10-12) | | |
| 494 | 2025494 | 4E-74 ) >gij2914701 | (AC003974) cytochrome b5 [Arabidopsis thaliana] | |
| | | Length = 134 | | |
| 495 | 2025495 | Pkc_Phospho Site(1 3-15) | | |
| 496 | 2025496 | 3E-89 ) >embICAA74372l | (YI 4044) geranylgeranyl reductase [Arabidopsis | |
| | | thaliana]Length = 472 | | |
| 497 | 2025497 | Pkc_PhosphoSite(28-30) | | |
| 498 | 2025498 | 2E-50 >gi\|2613143 (AF030548) tubulin [Oryza sativa]Length = 451 | | |
| 499 | 2025499 | 5E-23 >gb1AAD45998.1 IACOOS9I 610 (AC00591 6) Contains similarity to | | |
| | | gb1D88035 glycoprotein specific U OP-glucuronyltransferase from Rattus | | |
| | | norvegicus. [Arabidopsis thaliana]Length = 405 | | |
| 500 | 2025500 | 2E-23 >embICAAl 6874.21 (AL021749) copper-binding protein-like | | |
| | | [Arabidopsis thaliana]Length = 336 | | |
| 501 | 2025501 | 1E-109 ) >gi\|3342249 (AF047719) GA3 [Arabidopsis thaliana] | | |
| | | >gi 13342251 (AF047720) GA3 [Arabidopsis thaI iana] | | |
| | | >gi\|5107824\|gbIAAD40137.1 1AF149413_18 (AFI 49413) Arabidopsis thaliana | | |
| | | cytochrome P450 GA3 (GB:AF047720); Pfam PF00067, Score = 248.8, E = 7.7e-71, | | |
| | | N = 1 Length = 509 | | |
| 502 | 2025502 | 9E-93 >dbjIBAA778l2.1I (AB027228) FASi [Arabidopsis thaliana]Length = | | |
| | | 366 | | |
| 503 | 2025503 | Tyr_Phospho_Site(85-93) | | |
| 504 | 2025504 | Tyr_Phospho_Site(210-217) | | |
| 505 | 2025505 | Tyr_Phospho_Site(214-221) | | |
| 506 | 2025506 | 5E-86 ) >embICAB37Sl4I (AL035540) farnesylated protein (ATFP6) | | |
| | | [Arabidopsis thaliana]Length = 153 | | |
| 507 | 2025507 | 3E-33 >embjCAA96O6Sj (Z71450) CLC-d chloride channel protein | | |
| | | [Arabidopsis thalianal Length = 792 | | |
| 508 | 2025508 | 5′ IE-25 >gi 12245394 (U89771) ARFi-binding protein [Arabidopsis | | |
| | | thaliana]Length = 454 | | |
| 509 | 2025509 | 5′ Pkc_Phospho_Site(63-65) | | |
| 510 | 2025510 | 1E-71 >gi\|3395756 (U76297) plantacyanin [Arabidopsis thaliana] | | |
| | | >gi\|3461812 (AC004138) basic blue protein [Arabidopsis thaliana]Length = 129 | | |
| 511 | 2025511 | Pkc_Phospho_Site(147-149) | | |
| 512 | 2025512 | Pkc_Phospho_Site(30-32) | | |
| 513 | 2025513 | 4E-69 >gbIAAB70035.1 IAAB7003S (AC002534) chloroplast prephenate | | |
| | | dehydratase Arabido sis thaliana Len th = 424 | | |
| 514 | 2025514 | Tyr_Phospho_Site(48-55) | | |
| 515 | 2025515 | Tyr_Phospho_Site(771-779) | | |
| 516 | 2025516 | 9E-97 >gb\|AAD32773.1IAC007661j10 (AC007661) growth regulator protein | | |
| | | [Arabidopsis thaliana]Length = 638 | | |
| 517 | 2025517 | 1E-14 >giI4l 00433 (AF000378) beta-glucosidase [Glycine max]Length = | | |
| | | 206 | | |
| 518 | 2025518 | IE-43>spIPI1139ITBAI_ARATH TUBULIN ALPHA-i CHAIN | | |
| | | >gi\|71583IpirIjUBMUAM tubulin alpha-i chain - Arabidopsis thaliana >gi\|166896 | | |
| | | (M21 414) alpha-i -tubulin [Arabidopsis thaliana] | | |
| | | >gi\|504241 0\|gbIAAD38249.1 jACOO6I 93_5 (ACOO61 93) alphal tubulin | | |
| | | [Arabidopsis thaliana]Length = 450 | | |
| 519 | 2025519 | 5′ 1 E-68 >gi 1464621 8jgbjAAD26884.1 1AC007290_3 (AC007290) GTP-binding | | |
| | | protein [Arabidopsis thaliana]Length = 537 | | |
| 520 | 2025520 | 5′ Pkc_Phospho_Site(35-37) | | |
| 521 | 2025521 | Tyr_Phospho_Site(300-307) | | |
| 522 | 2025522 | 2E-39 >gbIAAD24368.1 1AC00717t.4 (AC007171) disease resistance response | | |
| | | protein [Arabidopsis thaliana]Length = 447 | | |
| 523 | 2025523 | 1E-17 >gi\|3128219 (AC004077) selenium-binding protein [Arabidopsis | | |
| | | thaliana]Length = 398 | | |
| 524 | 2025524 | Pkc_Phospho_Site(2-4) | | |
| 525 | 2025525 | Pkc Phos ho Site 2-4 | | |
| 526 | 2025526 | 2E-45 >embfCAB4O994.1 I (AL049640) auxilin-like protein [Arabidopsis | | |
| 527 | 2025527 | Tyr_Phospho_Site(373-379) | | |
| 528 | 2025528 | SE-37 >gi 13201613 (AC004669) glutathione 5-transferase [Arabidopsis | | |
| | | thaliana]Length = 215 | | |
| 529 | 2025529 | lE-IQ0 >spIP42762IERD1ARATH ERDi PROTEIN PRECURSOR | | |
| | | >gi\|541859Ipir\|IJN0901 ERDi protein - Arabidopsis thaliana | | |
| | | >gi\|497629IdbjjBAA04506i (D17582) ERDi protein [Arabidopsis thaliana]Length = | | |
| | | 945 | | |
| 530 | 2025530 | 3′ Pkc_Phospho_Site(193-195) | | |
| 531 | 2025531 | 3′ Tyr_Phospho_Site(15-22) | | |
| 532 | 2025532 | Tyr_Phospho_Site(850-857) | | |
| 533 | 2025533 | 3E-94 >spIO24456IGBLPARATHGUANINE NUCLEOTIDE-BINDING | | |
| | | PROTEIN BETA SUBUNIT-LIKE PROTEIN (WD-40 REPEAT AUXIN- | | |
| | | DEPENDENT PROTEIN ARCA) >gij2289095 (U77381) WD-40 repeat protein | | |
| | | [Arabidopsis thalianal Length = 327 | | |
| 534 | 2025534 | Tyr_Phospho_Site(133-140) | | |
| 535 | 2025535 | Tyr_Phospho_Site(493-499) | | |
| 536 | 2025536 | Tyr_Phospho_Site(1079-1086) | | |
| 537 | 2025537 | 1E-67 >sp1038799\|ODPBARATH PYRUVATE DEHYDROGENASE El | | |
| | | COMPONENT BETA SUBUN IT, MITOCHONDRIAL PRECURSOR (PDHEl -B) | | |
| | | >gi\|520478 (U09137) pyruvate dehydrogenase El beta subunit [Arabidopsis | | |
| | | thaliana]>gij 1090498 jprfj 201 9230A pyruvate dehydrogenase [Arabidopsis | | |
| | | thalianal Length = 363 | | |
| 538 | 2025538 | 8E-66 >gbIAAD25555A JAC005850 12 (AC005850) PSI type III chlorophyll a/b- | | |
| | | binding protein [Arabidopsis thaliana]Length 273 | | |
| 539 | 2025539 | 3′ Pkc PhosphoSite(34-36) | | |
| 540 | 2025540 | 3′ Tyr_Phospho_Site(l 061-1067) | | |
| 541 | 2025541 | 5′ 3E-50 >gi\|3850823jembjCAA77136\|(Y18351) U2 snRNP auxiliary factor, | | |
| | | large subunit [Nicotiana plumbaginifolia]Length = 555 | | |
| 542 | 2025542 | 5′ 4E-83 >9iI2506276Isp1P21238IRUBA_ARATH RUBISCO SUBUNIT | | |
| | | BINDING-PROTEIN ALPHA SUBUNIT PRECURSOR (60 KD CHAPERONIN | | |
| | | ALPHA SUBUNIT) (CPN-60 ALPHA) >gi\|2129561 IpirIlS7l 235 chaperonin-60 | | |
| | | alpha chain - Arabidopsis thaliana >gif 1223910 (U49357) chaperonin-60 alpha | | |
| | | subunit [Arabidopsis thaliana]>gi | | |
| 543 | 2025543 | 8E-13 >gb\|AAD55496.1 jAC0081486 (AC008148) phosphoglucomutase | | |
| | | [Arabidopsis thalianal Length = 615 | | |
| 544 | 2025544 | 7E-86 >emb(CAB42911.1 (AL049862) protein I photosystem II oxygen- | | |
| | | evolving complex [Arabidopsis thaliana]>gi\|57485021emb1CAB53092.1 | | |
| | | (AJ 145957) precursor of the 33 kDa subunit of the oxygen evolving complex | | |
| | | [Arabidopsis thaliana]Length = 331 | | |
| 545 | 2025545 | 1 E-58 >gbIAAD22371.11AC0065803 (AC006580) chloroplast nucleoid DNA | | |
| | | binding protein (Arabidopsis thaliana]Length = 527 | | |
| 546 | 2025546 | 7E-17 >gi\|2708750 (AC003952) physical impedence protein | | |
| | | [Arabidopsis thaliana]Length = 452 | | |
| 547 | 2025547 | 2E-30 >gbIAAD4998O.1 (AC008075 13 (AC008075) Similar to gbjAFl 10333 | | |
| | | PrMC3 protein from Pinus radiata and is a member of PFjOO135 | | |
| | | Carboxylesterases family. EST gb(N37841 comes from this gene. [Arabidopsis | | |
| | | thalianal Length = 336 | | |
| 548 | 2025548 | 2E-86 >embICAAl 65521 (AL021635) HSP associated protein like | | |
| | | [Arabidopsis thalianal Length = 627 | | |
| 549 | 2025549 | Pkc_PhosphoSite(49-51) | | |
| 550 | 2025550 | 2E-68 >gbjAAD23619.1fAC007168_10 (AC007168) beta-hydroxyacyl-ACP | | |
| | | dehydratase [Arabidopsis thaliana]Length = 145 | | |
| 551 | 2025551 | Rgd(323-325) | | |
| 552 | 2025552 | 1E-10g >spIP53780IMETCARATH CYSTATHIONINE BETA-LYASE | | |
| | | PRECURSOR (CBL) (BETA-CYSTATHIONASE) (CYSTEINE LYASE) | | |
| | | >gi\|21295671pir1 jS61429 cystathionine beta-lyase (EC 4.4.1.8) - Arabidopsis | | |
| | | thaliana >gi\|704397 (L4051 1) cystathionine | | |
| 553 | 2025553 | 1E-12 >gblAAD464l2.1 1AF0962629 (AF096262) ER6 protein (Lycopersicon | | |
| | | esculentum]Length = 168 | | |
| 554 | 2025554 | Pkc_PhosphoSite(90-92) | | |
| 555 | 2025555 | 4E-40 >gb IAAD251 38.11AC007 1274 (AC007 127) ubiquitin protein [Arabidopsis | | |
| | | thalianal Length = 551 | | |
| 556 | 2025556 | 1E-91 >emb(CAB43428.11 (AL050300) protein [Arabidopsis thaliana] | | |
| | | Length = 209 | | |
| 557 | 2025557 | 4E-98 >gi\|3l 38972 (AF038505) dihydrolipoylacyltransferase subunit of | | |
| | | the branched-chain aipha-keto acid dehydrogenase complex [Arabidopsis thaliana] | | |
| | | Length | 483 | |
| 558 | 2025558 | 3′ | Tyr_Phospho_Site(373-380) | |
| 559 | 2025559 | 8E-36 >gif3831439 (AC005819) cytochrome b5 [Arabidopsis thalianall | | |
| | | >gi\|44159451gb1AAD20175j (AC006418) cytochrome b5 [Arabidopsis thaliana) | | |
| | | Length = 132 | | |
| 560 | 2025560 | 2E-41 >db1IBAA82866.1 I (AB023895) tubby-like protein [Lemna | | |
| | | paucicostata]Length 428 | | |
| 561 | 2025561 | Tyr_Phospho_Site(276-283) | | |
| 562 | 2025562 | Pkc_Phospho_Site(241-243) | | |
| 563 | 2025563 | Tyr_Phospho_Site(1211-1218) | | |
| 564 | 2025564 | Tyr_Phospho_Site(260-266) | | |
| 565 | 2025565 | 7E-50 >spjOO4421jSRI4ARATH SIGNAL RECOGNITION PARTICLE 14 KD | | |
| 566 | 2025566 | 4E-76 >embjCAB4S9 14.11 (AL080283) putaive DNA-binding protein | | |
| 567 | 2025567 | Tyr_Phospho_Site(3 19-327) | | |
| 568 | 2025568 | Rgd(832-834) | | |
| 569 | 2025569 | 2E-60 >gij2583125(AC002387) transketolase precursor [Arabidopsis | | |
| | | thaliana]Length = 741 | | |
| 570 | 2025570 | Zinc Finger C2h2(1 13-134) | | |
| 571 | 2025571 | Tyr_Phospho_Site(562-568) | | |
| 572 | 2025572 | Tyr_Phospho_Site(142-150) | | |
| 573 | 2025573 | 2E-67 >gi\|3249066(AC004473) Similar to S. cerevisiae SIKI P protein | | |
| | | gb1984964. ESTs gbjFl 5433 and gbjAA39Sl 58 come from this gene. [Arabidopsis | | |
| | | thalianal Length = 511 | | |
| 574 | 2025574 | Tyr_Phospho_Site(110-116) | | |
| 575 | 2025575 | Tyr_Phospho_Site(37-45) | | |
| 576 | 2025576 | 4E-52 >embICAB37481.11 (AL035539) amino acid transport protein | | |
| | | [Arabidopsis thaliana]Length 436 | | |
| 577 | 2025577 | 9E-37 >gb\|AAD27568.1jAF1141719 (AF114171) H beta 58 homolog [Sorghum | | |
| | | bicolor]Length = 616 | | |
| 578 | 2025578 | 3E-31 >gbIAAD31847.1IAF133531 I (AF133531) water channel protein MipI | | |
| | | [Mesembryanthemum crystallinumi Length = 252 | | |
| 579 | 2025579 | 6E-47 >pirIlS7l 372 embryonic abundant protein Em6 - Arabidopsis | | |
| | | thaliana >gi\|556805fembICAA77508I (Zi 1157) Em protein [Arabidopsis thaliana] | | |
| | | Length = 92 | | |
| 580 | 2025580 | 5′ 7E-1 8 >gi\|2792338 (AF040570) oxidoreductase [Amycolatopsis | | |
| | | mediterranei]Length 330 | | |
| 581 | 2025581 | Tyr_Phospho_Site(1158-1 165) | | |
| 582 | 2025582 | SE-32 ′ dbjIBAA24863I (AB007893) K1AA0433 [Homo sapiens]Length = | | |
| | | 1243 | | |
| 583 | 2025583 | Pkc_Phospho Site(1 0-12) | | |
| 584 | 2025584 | 8E-45 >gbIAAD4392O.1 AFi 304411 (AFI 30441) UVB-resistance protein UVR8 | | |
| | | [Arabidopsis thaliana]Length = 440 | | |
| 585 | 2025585 | 1E-104 >dbjlBAA040491 (D16628) ATsEH [Arabidopsis thaliana] | | |
| | | >gi\|2760840 IgbIAAB95308.1 (AC003 105) soluble epoxide hydrolase [Arabidopsis | | |
| | | thaliana]Length = 321 | | |
| 586 | 2025586 | Rgd(21 3-21 5) | | |
| 587 | 2025587 | Pkc_Phospho_Site(21-23) | | |
| 588 | 2025588 | 1E-26 >dbjIBAA33Ol2i (AB017026) oxysterol-binding protein [Mus | | |
| | | musculus]Length = 410 | | |
| 589 | 2025589 | 7E-85 ) >gi\|2642159 (ACOO3000) mannose-1-phosphate | | |
| | | guanyltransferase [Arabidopsis thaliana}>gi(3598958 (AF076484) GDP-mannose | | |
| | | pyrophosphorylase [Arabidopsis thalianal >giI4l 51 925 (AF108660) CYTi protein | | |
| | | [Arabidopsis thaliana]Length = 361 | | |
| 590 | 2025590 | 1E-47 >spIP9341IICGIC_ORYSA G1JS-SPECIFIC CYCLIN C-TYPE | | |
| | | >gi\|16956981dbjjBAA13181 I (D86925) C-type cyclin [Oryza satival Length = 257 | | |
| 591 | 2025591 | 0 >gij22621 70 (AC002329) predicted glycosyl hydrofase [Arabidopsis | | |
| | | thaliana]Length = 375 | | |
| 592 | 2025592 | 5′ Tyr_Phospho_Site(839-847) | | |
| 593 | 2025593 | 5′ Pkc_Phospho_Site(34-36) | | |
| 594 | 2025594 | Tyr_Phospho_Site(153-160) | | |
| 595 | 2025595 | 4E-55 >9i13367536 (AC004392) Contains similarity to symbiosis-related | | |
| | | like protein F1N2O.80 gi\|2961343 from A. thaliana BAG gbIALO22l4O. EST | | |
| | | gbjT04695 comes from this gene. [Arabidopsis thaliana]Length = 149 | | |
| 596 | 2025596 | Pkc_Phospho_Site(57-59) | | |
| 597 | 2025597 | Pkc_Phospho_Site(5-7) | | |
| 598 | 2025598 | Tyr_Phospho_Site(542-548) | | |
| 599 | 2025599 | Pkc_Phospho_Site(65-67) | | |
| 600 | 2025600 | 2E-63 >spjPl 95951UDPG_SOLTU UTP-GLUCOSE-1 -PHOSPHATE | | |
| | | URIDYLYLTRANSFERASE (UDP-GLUCOSE PYROPHOSPHORYLASE) | | |
| | | (UDPGP) (UGPASE) >gi\|67061 pin IXNPOU UTP-glucose-1 -phosphate | | |
| | | uridylyltransferase (EC 2.7.7.9) - potato >gi 1218001 ldbi IBAAOOS7OI (D00667) | | |
| | | UDP-glucose pyrophosphorylase precursor [Solanum tuberosum]Length = 477 | | |
| 601 | 2025601 | 6E-59 >gbIAAD24412.1 1AF0363099 (AF036309) scarecrow-like 14 [Arabidopsis | | |
| | | thalianal Length = 808 | | |
| 602 | 2025602 | 4E-89 >emblCAB42558.1I (AJ131214) SF2IASF-like splicing modulator | | |
| | | Srp3O, variant 1 [Arabidopsis thaliana]Length = 256 | | |
| 603 | 2025603 | 1 E-1 24 ) >dbjlBAA34687I (ABOI 6819) UDP-glucose glucosyltransferase | | |
| | | [Arabidopsis thaliana]Length = 481 | | |
| 604 | 2025604 | Rgd(263-265) | | |
| 605 | 2025605 | 9E-96 >gbiAAD2S9S2.1 IAFO8S7ILI (AF085717) callose synthase catalytic | | |
| | | subunit [Gossypium hirsutum]Length = 1899 | | |
| 606 | 2025606 | 5E-63 >spIP16972IFER_ARATH FERREDOXIN PRECURSOR | | |
| | | 1996921 pin 1S09979 ferredoxin [2Fe-25]precursor - Arabidopsis thaliana | | |
| | | ill 6437 IembICAA35754 I (X51 370) ferredoxin precursor [Arabidopsis thaliana] | | |
| | | >gi\|166698 (M35868) ferro | | |
| 607 | 2025607 | 2E-45 >pirl 1S59548 1 -aminocyclopropane-1 -carboxylate oxidase homolog | | |
| | | (clone 2A6) - Arabidopsis thaliana >giI599622iembICAA58l 511 (X83096) 2A6 | | |
| | | [Arabidopsis thaliana]>gii2809261 (AC002560) F21 B7.30 [Arabidopsis thalian | | |
| 608 | 2025608 | 5E-63 >spIP25O7OITCH2_ARATH CALMODULIN-RELATED PROTEIN 2, | | |
| | | TOUCH-INDUCED >gij25831 69 (AF026473) calmodulin-related protein | | |
| | | [Arabidopsis thaliana]Length = 161 | | |
| 609 | 2025609 | 4E-68 >pir11A36571 ubiquitin I ribosomal protein CEPS2 - Arabidopsis | | |
| | | thaliana >gi\|166930 (J05507) ubiquitin extension protein (UBQI) [Arabidopsis | | |
| | | thaliana]>gi\|166932 (J05508) ubiquitin extension protein (UBQ2) [Arabi | | |
| 610 | 2025610 | 3E-59 >gbIAAD46006.1 1AC007894A (AC007894) Strong similarity to | | |
| | | gbIAF092432 protein phosphatase type 2C from Lotus japonicus. EST gb1T76026 | | |
| | | comes from this gene. [Arabidopsis thalianal Length = 282 | | |
| 611 | 2025611 | TyrphosphoSite(259-265) | | |
| 612 | 2025612 | lE-ill >sp1023755IEF2BETVU ELONGATION FACTOR 2 (EF-2) | | |
| | | >gi\|12369714 IembICABO9900 I (Z971 78) elongation factor 2 [Beta vulgaris]Length | | |
| | | = 843 | | |
| 613 | 20256132E-75 >emblCAB40376.11(AJ012281) adenosine kinase [Zea mays]Length | | | |
| | | = 331 | | |
| 614 | 2025614 | 3′ 2E-48 >gi\|3660467jembICAA05023l (AJ001807) succinyl-CoA-ligase alpha | | |
| | | subunit [Arabidopsis thaliana]Length = 347 | | |
| 615 | 2025615 | 4E-16 >emb\|CAA201 301 (ALO31 179) serine-threonine protein phosphatase | | |
| | | [Schizosaccharomyces pombe]Length 332 | | |
| 616 | 2025616 | 3E-86 >gbIAAD18O95I (AC006416) Similar to gi\|1573829 H10816 | | |
| | | aminopeptidase P homolog (pepP) from Haemophilus influenzae genome | | |
| | | gb1U32764. [Arabidopsis thaliana]Length = 451 | | |
| 617 | 2025617 | 1E-62 ) >pirl1A36571 ubiquitin I ribosomal protein CEP52 - Arabidopsis | | |
| | | thaliana >911166930 (J05507) ubiquitin extension protein (UBQI) [Arabidopsis | | |
| | | thaliana]>gi\|166932 (J05508) ubiguitin extension protein (UBQ2) [Arab | | |
| 618 | 2025618 | Tyr_Phospho_Site(21 0-218) | | |
| 619 | 2025619 | 1E-157 >emblCAA756O2I (Y15382) RNA binding protein [Arabidopsis | | |
| | | thalianal Length 374 | | |
| 620 | 2025620 | Pkc_PhosphoSite(34-36) | | |
| 621 | 2025621 | 2E-65 ) >embICAB43488.1I (AJ012278) ATP-dependent Cip protease | | |
| | | subunit CIpP [Arabidopsis thaliana]>gi\|5360579ldbj1BAA82065.1 j (AB022326) | | |
| | | nCIpPl [Arabidopsis thaliana]Length = 298 | | |
| 622 | 2025622 | Pkc_Phospho_Site(65-67) | | |
| 623 | 2025623 | Pkc_Phospho_Site(7-9) | | |
| 624 | 2025624 | Pkc_Phospho_Site(33-35) | | |
| 625 | 2025625 | lE-SI >spIP42825IDNJH_ARATH DNAJ PROTEIN HOMOLOG ATJ | | |
| | | >gi\|535588 (L361 13) [Arabidopsis thaliana3 >gi\|I 5823561prf1121 1 8338A AtJ2 | | |
| | | protein [Arabidopsis thaliana]Length = 419 | | |
| 626 | 2025626 | 4E-25 >spIP2S86OIMT2A_ARATH METALLOTHIONEIN-LIKE PROTEIN 2A | | |
| | | (MT-2A) (MT-K) (MT-i G) >giIl 361 9981pir1 1557861 metallothionein 2a - | | |
| | | Arabidopsis thaliana >gi\|555976 (UI 5108) metallothionein-like protein [Arabidopsis | | |
| | | thaliana]>giIiS8O892jprfiI2l 16236A metallothionein 1 [Arabidopsis thaliana] | | |
| | | Length = 81 | | |
| 627 | 2025627 | 5′ 1 E-36 >giIl 066501 (L22302) serine/threonine protein kinase | | |
| | | [Arabidopsis thaliana]Length = 425 | | |
| 628 | 2025628 | 6E-1 I >refINP 006824.1 IPMOV34-34KD1 COP9 subunit 6 (M0V34 homolog, 34 | | |
| | | kD) >gi 12360945 (U70735) 34 kDa Mov34 homolog [Homo sapiens]Length = 297 | | |
| 629 | 2025629 | Rgd(81 4-816) | | |
| 630 | 2025630 | Pkc_Phospho_Site(69-71) | | |
| 631 | 2025631 | 4E-52 >spIP428SSIZBI4_BRAJU 14 KD ZINC-BINDING PROTEIN (PROTEIN | | |
| | | KINASE C INHIBITOR) (PKCI) >gij493053 (U09406) protein kinase C inhibitor | | |
| | | [Brassica juncea]Length = 113 | | |
| 632 | 2025632 | Pkc_Phospho_Site 39-41 | | |
| 633 | 2025633 | 7E-53 >gi\|3033375 (AC004238) berberine bridge enzyme [Arabidopsis | | |
| | | thaliana]Length = 532 | | |
| 634 | 2025634 | 3E-53 >gbIAAD20097I (AC006532) NADH dehydrogenase [Arabidopsis | | |
| | | thaliana]Length = 103 | | |
| 635 | 2025635 | Pkc_PhosphoSite(26-28) | | |
| 636 | 2025636 | 1 E-100 >gi\|2736147 (AFO21 804) fatty acid hydroxylase Fahip | | |
| | | [Arabidopsis thaI lana]>9113132481 (AC003096) fatty acid hydroxylase, FAH 1 | | |
| | | [Arabidopsis thaliana]Length = 237 | | |
| 637 | 2025637 | 5E-81 >spjP42799 IGSA1_ARATH GLUTAMATE-i -SEMIALDEHYDE 2,1 - | | |
| | | AMINOMUTASE I PRECURSOR (GSA 1) (GLUTAMATE-i -SEMIALDEHYDE | | |
| | | AMINOTRANSFERASE 1) (GSA-AT 1) >gi\|454357 (U03773) glutamate-i- | | |
| | | semialdehyde-2,i-am inomutase [Arabidopsis thalia | | |
| 638 | 2025638 | Pkc_Phospho_Site(151-153) | | |
| 639 | 2025639 | 3E-66 >sp1P496921RL7A_ARATH 60S RIBOSOMAL PROTEIN L7A | | |
| | | >gi\|2529665 (AC002535) ribosomal protein L7A [Arabidopsis thaliana]Length = | | |
| | | 257 | | |
| 640 | 2025640 | 3E-42 >gb\|AAD30649.11AC00608592 (AC006085) photosystem II S KD protein | | |
| | | [Arabidopsis thalianal Length = 106 | | |
| 641 | 2025641 | Tyr_Phospho_Site(477-485) | | |
| 642 | 2025642 | 1E-64 >gbIAAB94O84.1 I (AF024623) galactose kinase [Arabidopsis | | |
| | | thaliana]Length = 496 | | |
| 643 | 2025643 | Pkc_PhosphoSite(60-62) | | |
| 644 | 2025644 | 5E-74 >gi\|1800281 (U82086) polyubiquitin [Fragaria x ananassa]Length | | |
| | | = 381 | | |
| 645 | 2025645 | 7E-66 >embICAB56l 49.1 (AJ242970) BTF3b-Iike factor [Arabidopsis | | |
| | | thaliana]Length = 165 | | |
| 646 | 2025646 | TyrPhosphQSite(636-643) | | |
| 647 | 2025647 | 9E-22 >embICAAl 8474.1 | (AL022347) serine/threonine kinase [Arabidopsis | |
| | | thaliana]Length = 581 | | |
| 648 | 2025648 | 5E-96 >spIP258I8ITIPG_ARATH TONOPLAST INTRINSIC PROTEIN, | | |
| | | GAMMA (GAMMA TIP) (AQUAPORIN-TIP) >gi 199761 lpirl1522202 tonoplast | | |
| | | intrinsic protein gamma - Arabidopsis thaliana >gi\|16312IembfCAA451 151 | | |
| | | (X63552) tonoplast intrinsic protein, gamma-TIP(Ara). [Arabidopsis thalianal | | |
| | | >gi\|166732 (M84344) tonoplast intrinsic protein [Arabidopsis thaliana] | | |
| | | >gi 4883600 IgbIAAD3I 569.1 jAC006922_1 (AC006922) tonoplast intrinsic protein | | |
| | | gamma [Arabidopsis thaliana]>gi j4451 29lprfI Ii 908432B tonoplast intrinsic protein | | |
| | | gamma [Arabidopsis thaliana]Length = 251 | | |
| 649 | 2025649 | 6E-23 >gi\|3763932 (AC004450) protein kinase [Arabidopsis thaliana] | | |
| | | Len th = 367 | | |
| 650 | 2025650 | 4E-77 >gi\|3738287 (AC005309) glutathione s-transferase, GST6 | | |
| | | [Arabidopsis thalianal Length = 263 | | |
| 651 | 2025651 | 1E-1 0 >gi 14091808 (AF053307) deacetylvindol me 4-0-acetyltransferase | | |
| | | [Catharanthus roseus]Length = 439 | | |
| 652 | 2025652 | 7E-92 >gi\|2281 09S (AC002333) cysteine synthase, cpACS1 [Arabidopsis | | |
| | | thaliana]Length = 392 | | |
| 653 | 2025653 | Pkc Phos ho Site 24-26 | | |
| 654 | 2025654 | Pkc_Phospho_Site(58-60) | | |
| 655 | 2025655 | 7E-48 >giI3l 28168 (AC004521) carboxyl-terminal peptidase | | |
| | | [Arabidopsis thaliana]Length = 415 | | |
| 656 | 2025656 | S′ Tyr_Phospho_Site(434-441) | | |
| 657 | 20256S7 | 5′ 9E-43 >gi\|3219782IspIQ60809ICAF1_MOUSE CCR4-ASSOCIATED | | |
| | | FACTOR 1 (CAFi) >gi\|726136 (U21 855) mCAF1 protein [Mus musculus]Length = | | |
| | | 285 | | |
| 658 | 202S658 | 9E-28 >gi\|324271 8 (AC003040) acetone-cyanohydrin lyase [Arabidopsis | | |
| | | thaliana]Length = 179 | | |
| 659 | 20256S9 | 3E-12 >gbIAAD14S35i (AC006200) NADC homolog [Arabidopsis thaliana] | | |
| | | Length = 323 | | |
| 660 | 202S660 | 3E-89 >giI3l 32696 (AFO6I 962) SAR DNA-binding protein-i [Pisum | | |
| | | sativum]Length = 560 | | |
| 661 | 2025661 | 3E-91 >gi\|3426048 (ACOOSI 68) hydroxymethylglutaryl-COA lyase | | |
| | | precursor [Arabidopsis thaliana]Length = 433 | | |
| 662 | 2025662 | 1E-103 >gbjAAFOl284.11AF1779899 (AF177989) alpha-soluble NSF attachment | | |
| | | protein; alpha-SNAP [Arabidopsis thaliana]Length = 289 | | |
| 663 | 2025663 | 4E-96 >emblCAAl 8628.1 j (AL022580) pectinacetylesterase protein | | |
| | | [Arabidopsis thaliana]Length = 362 | | |
| 664 | 2025664 | 6E-58 >gbIAAD46412.1 1AF096262 1 (AF096262) ER6 protein [Lycopersicon | | |
| | | esculentum] Length = 168 | | |
| 665 | 2025665 | 1E-93 >embICAA7l 5871 (Y1 0555) CONSTANS [Arabidopsis thalianal | | |
| | | >91 j2695705jembjCAA71 5881 (Y10556) CONSTANS [Arabidopsis thaliana]Length | | |
| | | = 355 | | |
| 666 | 2025666 | Tyr_Phospho_Site(598-605) | | |
| 667 | 2025667 | Pkc_Phospho_Site(1 7-19) | | |
| 668 | 2025668 | Tyr_Phospho_Site(432-439) | | |
| 669 | 2025669 | 1 E-1 02 >gi\|832876 (L41 345) ascorbate free radical reductase [Solanum | | |
| | | lycopersicumil >gi\|10973681prf1121 13407A ascorbate free radical reductase | | |
| | | [Lycopersicon esculentum]Length = 433 | | |
| 670 | 2025670 | 2E-27 >ref IN P004634.1 IPPABP2 I poly(A)-bind ing protein-2 >gi\|2895276 | | |
| | | AF026029 ol A bindin rotein II Homo sa lens Len th = 306 | | |
| 671 | 2025671 | 3E-59 >embICAA6734Ol (X98808) peroxidase ATP3a [Arabidopsis | | |
| | | thalianal Length 331 | | |
| 672 | 2025672 | 5′ Tyr_Phospho_Site(503-51 1) | | |
| 673 | 2025673 | 5′ 2E-35 >gi\|24648991emb10AB16803.1 I (Z99708) geranylgeranyl | | |
| | | pyrophosphate synthase [Arabidopsis thaliana] Length = 371 | | |
| 674 | 2025674 | 2E-58 >gi\|4097555 (U64910) ATFP7 [Arabidopsis thaliana]Length = 112 | | |
| 675 | 2025675 | 3E-12 >gb\|AAD1 56111 (AC006232) beta-1,3-glucanase [Arabidopsis | | |
| 676 | 2025676 | 2E-31 >emb\|CAB40131.11(Y1 7914) cyclic nucleotide and calmodulin- | | |
| 677 | 2025677 | 4E-88 >emb\|CAB45799.11(AL080252) nodulin-like protein [Arabidopsis | | |
| 678 | 2025678 | 3E-1 5 >emb\|CAA74021 (Y1 3673) TATA binding protein-associated factor | | |
| | | [Arabidopsis thaliana]Length = 527 | | |
| 679 | 2025679 | Tyr_Phospho_Site(302-31 0) | | |
| 680 | 2025680 | Tyr_Phospho_Site(1366-1372) | | |
| 681 | 2025681 | Tyr_Phospho_Site(805-813) | | |
| 682 | 2025682 | Tyr_Phospho_Site(1200-1208) | | |
| 683 | 2025683 | Rgd(965-967) | | |
| 684 | 2025684 | 7E-41 >giI2l 94138 (AC002062) Similar to Arabidopsis receptor-like | | |
| | | protein kinase precursor (gbIM84659). [Arabidopsis thaliana]Length 574 | | |
| 685 | 2025685 | IE-22 >spIQ43OI9INLT3_PRUDU NONSPECIFIC LIPID-TRANSFER | | |
| | | PROTEIN 3 PRECURSOR (LTP 3) >gi\|1321915IembICAA65477l (X96716) lipid | | |
| | | transfer protein [Prunus dulcis]Length = 123 | | |
| 686 | 2025686 | 3′ Tyr_Phospho_Site(232-240) | | |
| 687 | 2025687 | 5′ Pkc_Phospho_Site(13-15) | | |
| 688 | 2025688 | 5′ T r Phos ho Site 953-959 | | |
| 689 | 2025689 | 1E-47 >embICAA544l9I (X77199) heat shock cognate 70-1 [Arabidopsis | | |
| | | thaliana]Length = 637 | | |
| 690 | 2025690 | 3E-60 >gi\|3927831 (AC005727) similar to mouse ankyrin 3 [Arabidopsis | | |
| | | thaliana]Length = 426 | | |
| 691 | 2025691 | Tyr_Phospho_Site(565-572) | | |
| 692 | 2025692 | T r Phos ho Site 216-222 | | |
| 693 | 2025693 | Tyr_Phospho_Site(545-552) | | |
| 694 | 2025694 | 1 E-33 >embICAA73l 051 (Y1 2503) Man9-mannosidaSe [Sus scrofa]Length | | |
| | | = 659 | | |
| 695 | 2025695 | Tyr_Phospho_Site(569-576) | | |
| 696 | 2025696 | Tyr_Phospho_Site(2-8) | | |
| 697 | 2025697 | 1 E-81 >sp1065788IC7B2_ARATH CYTOCHROME P450 71 B2 | | |
| | | >gi\|3164140IdbjIBAA28537I (078605) cytochrome P450 monooxygenase | | |
| | | Arabidoysis thaliana Length = 502 | | |
| 698 | 2025698 | 4E-22 >pir11562626 protein disulfide-isomerase (EC 5.3.4.1) - Castor | | |
| | | bean >gi\|1134968 (U41385) protein disulphide isomerase PDI [Ricinus communis] | | |
| | | >gij15872101prfI12206331A protein disulfide isomerase [Ricinus communi | | |
| 699 | 2025699 | Tyr_Phospho_Site(1 030-1037) | | |
| 700 | 2025700 | 6E-81 ) >gbIAAD38059.1 1AF1533521 (AF153352) CDPK-related kinase 2 | | |
| | | [Arabidopsis thaliana]Length = 594 | | |
| 701 | 2025701 | 1 E-1 12 >gi\|2529663 (AC002535) lysophospholipase [Arabidopsis | | |
| | | thaliana]>gi 13738277 (AC005309) lysophosphol ipase [Arabidopsis thaliana] | | |
| | | Length = 326 | | |
| 702 | 2025702 | 2E-57 >spjQ39O8OIDAD1ARATH DEFENDER AGAINST CELL DEATH 1 | | |
| | | (DAD-I) >gi 12129570 jpirj 1S71269 DAD-i homolog - Arabidopsis thaliana | | |
| | | >giIl 1841 93lemblCAA64837l (X95585) DAD-i homologue [Arabidopsis thaliana] | | |
| | | Length = 115 | | |
| 703 | 2025703 | 4E-37 >spjP02308iH4_WHEAT HISTONE H4 >91170771 IpirIIHSZM4 histone | | |
| | | H4 - maize >gi\|816421pir1l506904 histone H4 - Arabidopsis thaliana | | |
| | | >gi\|21190281pir1lS60475 histone H4 - garden pea >gij21795jemb1CAA249241 | | |
| | | (X00043) histone H4 [Triticum aestivum]>gi\|166740 (M17132) histone H4 | | |
| | | [Arabidopsis thaliana]>gij166742 (M17133) histone H4 [Arabidopsis thaliana] | | |
| | | >gi\|168499 (M36659) histone H4 (H4C13) [Zea mays]>gijl68SOl (M13370) | | |
| | | histone H4 [Zea mays]>gi\|168503 (M13377) histone H4 [Zea mays]>gi\|498898 | | |
| | | (U10042) histone H4 homolog [Pisum sativum]>giIl8O628SIembICABOl 9141 | | |
| | | (Z79638) histone H4 homologue [Sesbania rostratal >gif3927823 (AC005727) | | |
| | | histone H4 [Arabidopsis thaliana]>gij45803851gblAAD24364.11AC007184_4 | | |
| | | (AC007184) histone H4 [Arabidopsis thaliana]>gi\|600991 5IdbilBAA8Sl 20.11 | | |
| | | (ABOI 8245) histone H4-like protein [Solanum melongena] | | |
| | | >gi\|2258381prf1\|1314298A histone H4 [Arabidopsis thaliana]Length = 103 | | |
| 704 | 2025704 | 2E-56 >embICAAl 8841 .11 (AL023094) ribosomal protein S16 [Arabidopsis | | |
| | | thaliana]Length 113 | | |
| 705 | 2025705 | 3′ Pkc_Phospho Site(1 0-12) | | |
| 706 | 2025706 | 3′ 4E-57 >gij49721 141 emb 1CAB43971 .11 (AL078579) beta-glucosidase | | |
| | | [Arabidopsis thaliana]Length = 517 | | |
| 707 | 2025707 | 5′ Tyr_Phospho_Site(585-591) | | |
| 708 | 2025708 | 5′ 3E-69 >giI1169544IspIP42762IERD1_ARATH ERDI PROTEIN | | |
| | | PRECURSOR >gii54l859lpirlIJNO9Ol ERDI protein - Arabidopsis thaliana | | |
| | | >gi\|4976291dbj1BAA045061 (017582) ERDi protein [Arabidopsis thaliana]Length = | | |
| | | 945 | | |
| 709 | 2025709 | 9E-30 >emblCABlO2l6.1I (Z97336) disease resistance N like protein | | |
| | | [Arabidopsis thaliana]Length = 1996 | | |
| 710 | 2025710 | Tyr_Phospho_Site(202-209) | | |
| 711 | 2025711 | Tyr_Phospho_Site(731-739) | | |
| 712 | 2025712 | 1E-103 >embICAAO92O5j (AJ010466) RNA helicase [Arabidopsis thaliana] | | |
| | | Length = 451 | | |
| 713 | 2025713 | 9E-24 >dbj(BAA79274.11 (AP000059) 180aa long hypothetical proteinase I | | |
| | | [Aeropyrum pern ix]Length = 180 | | |
| 714 | 2025714 | 1E-1 21 >gbjAAD26885.11AC007290A (AC007290) purple acid phosphatase | | |
| | | precursor [Arabidopsis thaliana]Length = 469 | | |
| 715 | 2025715 | Tyr_Phospho_Site(1 51-158) | | |
| 716 | 2025716 | 1E-17 >gi\|2252866 (AF013294) contains region of similarity to SYT | | |
| | | [Arabidopsis thaliana]Length = 230 | | |
| 717 | 2025717 | Pkc PhosphoSite(183-185) | | |
| 718 | 2025718 | 1E-12 >gi\|2586153 (AFOO1S3O) ripening-associated protein [Musa | | |
| | | acuminata]Length = 68 | | |
| 719 | 2025719 | 8E-58 >gb1AAC78267.1 1AAC78267 | (AC002330) cullin-like 1 protein | |
| | | [Arabidopsis thaliana]Length = 676 | | |
| 720 | 2025720 | 1E-58 >gbIAAD173I3I (AF123310) NAC domain protein NAM | | |
| | | [Arabidopsis thaliana]>gi\|43252861gbjAAD1 731 4j (AFI 23311) NAC domain | | |
| | | protein NAM [Arabidopsis thalianal Length = 320 | | |
| 721 | 2025721 | 5′ 2E-94 >gif2129648\|pirjfS71284 MYB-related protein 33,3K - Arabidopsis | | |
| | | thaliana >gi\|12630951emb1CAA908091 (Z54136) MYB-related protein [Arabidopsis | | |
| | | thaliana]Length = 305 | | |
| 722 | 2025722 | Tyr_Phospho_Site(576-584) | | |
| 723 | 2025723 | 9E-39 >gbIAAD25662.1 fAC0070204 (AC007020) receptor protein kinase | | |
| | | [Arabidopsis thaliana]Length = 238 | | |
| 724 | 2025724 | 1E-42 >gij3927825 (AC005727) dTDP-glucose 4-6-dehydratase | | |
| | | [Arabidoysis thaliana] Length = 343 | | |
| 725 | 2025725 | 3E-50 >dbj\|BAA16755j (090900) dihydrolipoamide dehydrogenase | | |
| | | [Synechocystis sp.1 Length = 478 | | |
| 726 | 2025726 | 2E-73 >spIQ07098IP2A1ARATH SERINE/THREONINE PROTEIN | | |
| | | PHOSPHATASE PP2A-1 CATALYTIC SUBUNIT >gij4l 87791pirll531 162 | | |
| | | phosphoprotein phosphatase (EC 3.1.3.16) 2A-alpha catalytic chain (clone EP14a) | | |
| | | [Arabidopsis thaliana]>gi\|166823 (M96733) protein phosphatase [Arabidopsis | | |
| | | thalianal | | |
| 727 | 2025727 | IE-102 >embjCABl 021 5.11 (Z97336) ankyrin like protein [Arabidopsis | | |
| | | thaliana]Length = 936 | | |
| 728 | 2025728 | Tyr_Phospho_Site(854-861) | | |
| 729 | 2025729 | Tyr_Phospho_Site(1041-1047) | | |
| 730 | 2025730 | 3E-28 >spIP41 0561R33B YEAST 605 RIBOSOMAL PROTEIN L33-B (L37B) | | |
| | | (YL37) (RP47) >gi\|630323jpir1j544069 ribosomal protein L35a.e.cl S - yeast | | |
| | | (Saccharomyces cerevisiae) >gi\|484241 (L23923) ribosomal protein L37 | | |
| | | [Saccharomyces cerevisiae] >gi\|11420537 Iemb 1CAA994541 (Z751 42) ORF | | |
| | | YOR234c Saccharom ces cerevisiae Length = 107 | | |
| 731 | 2025731 | Tyr_Phospho_Site(762-769) | | |
| 732 | 2025732 | 2E-29 >embICAA047491 (AJ001414) GTPase activating protein [Yarrowia | | |
| | | lipolytical Length = 730 | | |
| 733 | 2025733 | 2E-40 >gij2317912 (U89959) cathepsin B-like cysteine proteinase | | |
| | | [Arabidopsis thaliana]Length = 357 | | |
| 734 | 2025734 | 5E-27 >sPIQ388O5IMT2BARATH METALLOTHIONEIN-LIKE PROTEIN 2B | | |
| | | (MT-2B) >gijl36l 9991pir1 557862 metallothionein 2b - Arabidopsis thaliana | | |
| | | >gi\|1086463 (Ul 1256) metallothionein [Arabidopsis thaliana]Length = 77 | | |
| 735 | 2025735 | 3E-26 >spIP37223IMAOX_MESCR MALATE OXIDOREDUCTASE (MALIC | | |
| | | ENZYME) (ME) (NADP-DEPENDENT MALIC ENZYME) (NADP-ME) | | |
| | | >gi Ii 0843001pir1 1543718 malate dehydrogenase (oxaloacetate-decarboxylating) | | |
| | | (NADP+) (EC 1.1.1.40) - common ice plant >gij432380jembjCAA45772j (X64434) | | |
| | | malate dehydrogenase (oxaloacetate decarboxylating) (NADP+) | | |
| | | [Mesembryanthemum crystallinum]Length = 585 | | |
| 736 | 2025736 | Tyr_Phospho_Site(4-1 0) | | |
| 737 | 2025737 | 2E-24 >gi\|2435604 (AF026213) strong similarity to Saccharomyces | | |
| | | cerevisiae endosomal P24A protein (SP:P32802) [Caenorhabditis elegans]Length | | |
| | | = 655 | | |
| 738 | 2025738 | 1E-106 >spIP46O77I143HARATH 14-3-3-LIKE PROTEIN GF14 PHI | | |
| | | >gi\|1493805 (L091 11) GFI4 protein phi chain [Arabidopsis thaliana]>gi\|2232146 | | |
| | | (AF001414) 14-3-3-like protein GFI4 phi [Arabidopsis thaliana]Length = 267 | | |
| 739 | 2025739 | 1 E-103 >dbjIBAA34687f (AB016819) UDP-gtucose glucosyltransferase | | |
| | | [Arabidopsis thaliana]Length = 481 | | |
| 740 | 2025740 | 3′ Tyr_Phospho_Site(212-218) | | |
| 741 | 2025741 | 5′ 8E-57 >gij7299051sp1Q05999jKPK7 ARATH SERINE/THREONINE | | |
| | | PROTEIN KINASE PK7 >gij3205621pir1jJ01385 protein kinase (EC 2.7.1.37) - | | |
| | | Arabidopsis thaliana >gi\|303500ldbjIBAAO1 716.11 (010910) serine/threonine | | |
| | | protein kinase [Arabidopsis thalianal Length = 578 | | |
| 742 | 2025742 | 1 E-115 >gi 12435517 (AF024504) contains similarity to peptidase family | | |
| | | Al\|Arabidopsis thalianal Length 472 | | |
| 743 | 2025743 | 1 E-70 >9112688839 (AF003347) ATP phosphoribosyltransferase [Thiaspi | | |
| | | goesingense]Length = 403 | | |
| 744 | 2025744 | 8E-36 >gi\|3193326 (AF069299) contains similarity to transcriptional | | |
| | | activators such as Ra-like and myc-like regulatory R proteins [Arabidopsis | | |
| | | thaliana]Length = 329 | | |
| 745 | 2025745 | Tyr_Phospho_Site(l 17-125) | | |
| 746 | 2025746 | 1E-103 ) >gbIAAD2I44I.11 (AC006921) salt-inducible protein [Arabidopsis | | |
| | | thalianal Length 497 | | |
| 747 | 2025747 | 1 E-68 >gbjAADl 53971 (AC006223) CCR4-associated transcription factor | | |
| | | [Arabidopsis thaliana]Length 252 | | |
| 748 | 2025748 | 1E-162 >gbjAAD3l347.11AC007212 3 (AC007212) mitochondrial protein | | |
| | | [Arabidopsis thaliana]Length 996 | | |
| 749 | 2025749 | Tyr_Phospho_Site(986-993) | | |
| 750 | 2025750 | Pkc_Phospho_Site(90-92) | | |
| 751 | 2025751 | Pkc_Phospho_Site(30-32) | | |
| 752 | 2025752 | Tyr_Phospho_Site(375-382) | | |
| 753 | 2025753 | 3′ Pkc_Phospho_Site(68-70) | | |
| 754 | 2025754 | 5′ Pkc_Phospho_Site(42-44) | | |
| 755 | 2025755 | 1E-165 >embICABS6692.11 (AJ249794) lipoxygenase [Arabidopsis thaliana] | | |
| | | Length = 919 | | |
| 756 | 2025756 | Tyr_Phospho_Site(778-786) | | |
| 757 | 2025757 | 1 E-48 >embjCABlO248.1 I (Z97336) light induced protein like [Arabidopsis | | |
| | | thaliana]Length = 318 | | |
| 758 | 2025758 | 2E-91 ) >gb\|AAD39329.1 IAC007258_18 (AC007258) ABC transporter | | |
| | | [Arabidopsis thaliana]Length 1469 | | |
| 759 | 2025759 | Tyr_Phospho_Site(71 5-722) | | |
| 760 | 2025760 | 1 E-23 >gi\|262291 I (AE000933) stomatin-like protein liMethanobacterium | | |
| | | thermoautotrophicuml Length = 297 | | |
| 761 | 2025761 | Tyr_Phospho_Site(245-253) | | |
| 762 | 2025762 | 2E-86 >gblAAD38O33.1 1AF1490539 (AF149053) phytochrome kinase substrate | | |
| 763 | 2025763 | 6E-96 >spjO64637IC7C2ARATH CYTOCHROME P450 76C2 >gi\|2979549 | | |
| 764 | 2025764 | Tyr_Phospho_Site(1 3-19) | | |
| 765 | 2025765 | 3E-77 ) >gi\|2454184 (U80186) pyruvate dehydrogenase El beta subunit | | |
| | | [Arabidopsis thaliana]Length = 406 | | |
| 766 | 2025766 | 2E-71 >spIP492O3IRS13ARATH 40S RIBOSOMAL PROTEIN S13 Length = | | |
| | | 150 | | |
| 767 | 2025767 | 1E-83 >embjCAB55622. 1J(AJOl 1044) cysteine synthase [Arabidopsis | | |
| | | thaliana]Length = 176 | | |
| 768 | 2025768 | 1 E-90 ) >gi\|3219355(AF062371) ROOT HAIRLESS I [Arabidopsis | | |
| | | thaliana]>gi(5733871I9bIAAD49759.11AC007932_7 (AC007932) Identical to | | |
| | | gb1AF062371 ROOT HAIRLESS 1 (RHLI) from Arabidopsis thaliana. ESTs | | |
| | | gb1H37372, gbIAA6513l3 and gb1Z29767 come from this gene. Length = 355 | | |
| 769 | 2025769 | 7E-56 >emblCAB5275O.l I (AJ245632) photosystem I subunit VI precursor | | |
| | | [Arabidopsis thaliana]Length = 145 | | |
| 770 | 2025770 | 1E-59 >sp1P49691IRL4_ARATH605 RIBOSOMAL PROTEIN L4 (Li) Length = | | |
| | | 404 | | |
| 771 | 2025771 | 2E-34 >gbjAAD4898l .1 jAF162444 13 (AFi 62444) contains similarity to Solanum | | |
| | | lycopersicum (tomato) wound induced protein (GB:X59882) [Arabidopsis thaliana] | | |
| | | Length = 87 | | |
| 772 | 2025772 | 1E-40 >embjCAB4352O.1 f (AJ238802) MAP kinase [Arabidopsis thaliana] | | |
| | | Length = 549 | | |
| 773 | 2025773 | Tyr_Phospho_Site(1 248-1254) | | |
| 774 | 2025774 | 5′ 4E-91 >911441 5924IgbIAAD201 551 (AC006282) glucosyl transferase | | |
| | | [Arabidopsis thalianal Length = 495 | | |
| 775 | 2025775 | Pkc_PhosphoSite(30-32) | | |
| 776 | 2025776 | 9E-94 >gij2062156 (AC001645) jasmonate inducible protein isolog | | |
| | | [Arabidopsis thaliana]Length = 451 | | |
| 777 | 2025777 | 5E-44 >gbjAAD56998.1 1AC0094659 2 (AC009465) mitogen activated protein | | |
| | | kinase kinase [Arabidopsis thaliana]Length = 700 | | |
| 778 | 2025778 | 0 >gbIAAD4599O.11AC0059162 (AC005916) Similar to gb1U04299 mannosyl- | | |
| | | oligosaccharide alpha-1,2-mannosidase from Mus musculus. ESTs gb\|R84145 | | |
| | | and gbIAA3947O7 come from this gene. [Arabidopsis thaliana]Length = 574 | | |
| 779 | 2025779 | 1E-120 >spIP43288IKSGAARATH SHAGGY RELATED PROTEIN KINASE | | |
| | | ASK-ALPHA >911541901 IpirlIS4l 596 protein kinase ASK-alpha (EC 2.7.1 .-) - | | |
| | | Arabidopsis thaliana >gi(460832jemblCAA53181 I (X75432) shaggy related kinase | | |
| | | [Arabidopsis thaliana]>gij17698891embl0AA485381 (X68525) serine /threonine | | |
| | | protein kinase [Arabidopsis thaliana]Length = 405 | | |
| 780 | 2025780 | 4E-16 >spIOO2414IDYL1ANTCR DYNEIN LIGHT CHAIN LC6, FLAGELLAR | | |
| | | OUTER ARM >gi\|22089141dbj1BAA205251 (AB004830) outer arm dynein LC6 | | |
| | | [Anthocidaris crassispina]Length = 89 | | |
| 781 | 2025781 | 3E-48 >emblCAA23O48.1 I (AL035394) polygalacturonase [Arabidopsis | | |
| | | thaliana]Length = 444 | | |
| 782 | 2025782 | 1E-36 >gi\|3335347 (AC004512) Contains similarity to ARI, RING finger | | |
| | | protein gb(X98309 from Drosophila melanogaster. ESTs gbjT44383, gb1W43120, | | |
| | | gb1N65868, gbIH36Ol 3, gbjAA042241, gb1T76869 and gbIAA042359 come from | | |
| 783 | 2025783 | Tyr_Phospho_Site(12-19) | | |
| 784 | 2025784 | Tyr_Phospho_Site(600-606) | | |
| 785 | 2025785 | 8E-29 >emblCAAl67l6I (AL021710) glycolate oxidase - like protein | | |
| 786 | 2025786 | T r Phos ho Site 841-848 | | |
| 787 | 2025787 | 2E-16 >splP47735 | | |
| RLK5ARATH RECEPTOR-LIKE PROTEIN KINASE 5 | | | | |
| | | Arabidopsis thaliana >gi 1166850 (M84660) receptor-like protein kinase | | |
| | | [Arabidopsis thaliana]>gij2842492jemb\|CAA1 6889.1\|(ALO2 1749) receptor-like | | |
| | | protein kinase 5 precursor (RLKS) [Arabidopsis thaliana]Length = 999 | | |
| 788 | 2025788 | Tyr_Phospho_Site(378-385) | | |
| 789 | 2025789 | 2E-62 >gbIAAD28243.1 1AF1213569 (AF121356) peroxiredoxin TPx2 | | |
| | | [Arabidopsis thaliana]Length = 162 | | |
| 790 | 2025790 | 2E-24 >gbIAAD4O132.1 1AF149413.93 (AF149413) contains similarity to | | |
| | | arabinosidase [Arabidopsis thaliana]Length 521 | | |
| 791 | 2025791 | 9E-80 >gbjAAD34674.11AC0063412 (AC006341) Is a member of PF100481 | | |
| 792 | 2025792 | Rgd(373-375) | | |
| 793 | 2025793 | 3′ 9E-24 >gif13507831sp1P47735jRLK5_ARATH RECEPTOR-LIKE PROTEIN | | |
| | | precursor - Arabidopsis thaliana >giIl 66850 (M84660) receptor-like protein kinase | | |
| | | [Arabidopsis thaliana]>gi\|28424921embiCAA16889.1 I (AL021749) receptor-like | | |
| | | protein kinase 5 recursor RLK5 Arabido sis thaliana Len th 999 | | |
| 794 | 2025794 | 3′ Pkc_Phospho_Site(27-29) | | |
| 795 | 2025795 | 5′ Pkc_Phospho_Site(25-27) | | |
| 796 | 2025796 | Tyr_Phospho_Site(1216-1224) | | |
| 797 | 2025797 | Zinc Protease(338-347) | | |
| 798 | 2025798 | 1E-104 >gij3661 595 (AFO91 844) aminoalcoholphosphotransferase | | |
| | | Arabido sis thaliana Len th 389 | | |
| 799 | 2025799 | 8E-73 >gi\|41 85143 (AC005724) signal recognition particle receptor beta | | |
| 800 | 20258005E-62 >spIO222O3IC983ARATH | CYTOCHROME P450 98A3 >gi\|2623303 | | |
| 801 | 2025801Pkc_PhosphoSite(73-75) | | | |
| 802 | 20258024E-77 >embICABlO4l9.1 I (Z97341) transcription factor like protein | | | |
| 803 | 20258037E-18 >gi(2576361 (U39782) lysine and histidine specific transporter | | | |
| 804 | 2025804 | Tyr_Phospho_Site(1043-1051) | | |
| 805 | 2025805 | 5′ Srp54(488-501) | | |
| 806 | 2025806 | 5′ Tyr_Phospho_Site(228-236) | | |
| 807 | 2025807 | IE-14 >gi\|1657619 (U72504) G5p [Arabidopsis thaliana]>gij3068710 | | |
| | | (AF049236) transmembrane protein G5p [Arabidopsis thalianal Length = 588 | | |
| 808 | 2025808 | 8E-83 >spIP1 61 27ICHLIARATH MAGNESIUM-CHELATASE SUBUNIT CHLI | | |
| | | PRECURSOR (PROTEIN CS/CH-42) (MG-PROTOPORPHYRIN IX CHELATASE) | | |
| | | >gi\|81656fpirf IS 12785 protein ch-42 precursor, chloroplast - Arabidopsis thaliana | | |
| | | >gi\|10201001embjCAA62754I (X91 411) protoporphyrin-IX Mg-chetalase | | |
| | | [Arabidopsis thalianal >giI2832653IembICAA16728\|(AL021710) protein ch-42 | | |
| | | precursor, chloroplast [Arabidopsis thaliana]>gi 14490290 lemb 1CAB3856 1.11 | | |
| | | (X51 799) chloroplast protein [Arabidopsis thaliana]>911228771 jprfj\|1 811 226A ccsA | | |
| | | gene [Euglena gracilis]Length = 424 | | |
| 809 | 2025809 | Tyr_Phospho_Site(960-967) | | |
| 810 | 2025810 | 5E-32 >gi121 941 38 (AC002062) Similar to Arabidopsis receptor-like | | |
| | | protein kinase precursor (gb1M84659). [Arabidopsis thaliana]Length 574 | | |
| 811 | 2025811 | Pkc_PhosphoSite(29-31) | | |
| 812 | 2025812 | 4E-50 ) >embICAAl 8735.1 j (AL022604) UDP-galactose transporter-like | | |
| | | protein [Arabidopsis thaliana]Length 102 | | |
| 813 | 2025813 | Tyr_Phospho_Site(1219-1225) | | |
| 814 | 2025814 | T r Phos ho Site 473-480 | | |
| 815 | 2025815 | Pkc_Phospho_Site(80-82) | | |
| 816 | 2025816 | 2E-45 >embjCAB375O7I | (AL035540) probable H+-transporting ATPase | |
| 821 | 2025821 | 3E-82 >gi 132491 10 (ACOO3I 14) T12M4.6 [Arabidopsis thaliana]Length = | | |
| | | 467 | | |
| 822 | 2025822 | 1E-1 14 >9113894157 (AC005312) protein kinase, 3′ partial [Arabidopsis | | |
| | | thaliana]Length = 910 | | |
| 823 | 2025823 | 4E-39 >gbJAAD34674.1 AC0063412 (AC006341) Is a member of PF100481 | | |
| | | Protein hos hatase 2C famil . Arabido sis thaliana Len th = 491 | | |
| 824 | 2025824 | 8E-88 ) >gbIAAD40139.1\|AF149413_20 (AF149413) similar to malate | | |
| | | dehydrogenases; Pfam PF00390, Score = 1290.5. E = 0, N1 [Arabidopsis thaliana] | | |
| | | Length = 588 | | |
| 825 | 2025825 | 1 E-50 >emblCAB4S5Ol .1 (AL079349) serine/threonine-specific protein | | |
| | | kinase MHK [Arabidopsis thaliana]Length = 443 | | |
| 826 | 2025826 | Rgd(784-786) | | |
| 827 | 2025827 | 4E-42 >dbj\|BAA83470.1 (AB008847) Csf-2 [Cucumis sativusj Length = 151 | | |
| 828 | 2025828 | 2E-59 >gij3335378 (AC003028) Myb-related transcription activator | | |
| | | [Arabidopsis thaliana]Length = 291 | | |
| 829 | 2025829 | 3E-22 >refjNP 000657.1 IPACYl I aminoacylase 1 | | |
| | | >gi\|461 4661sp1Q031 54IACY1_HUMAN AMINOACYLASE-1 (N-ACYL-L-AMINO- | | |
| | | ACID AMIDOHYDROLASE) (ACY-1) >gi\|1082202\|pir\|IA47488 aminoacylase (EC | | |
| | | 3.5.1.14) - human >gi(178071 (L07548) aminoacylase-1 [Homo sapiens] | | |
| | | >gi\|285903jdbjfBAA033971 (D14524) aminoacylase-1 [Homo sapiens] | | |
| | | >gi\|303595IdbjjBAAO38141 (D16307) 45kDa protein [Homo sapiens]Length = 408 | | |
| 830 | 2025830 | 1 E-24 >embJCABl 0449.11 (Z97341) limonene cyclase like protein | | |
| | | [Arabidopsis thaliana]Length = 1024 | | |
| 831 | 2025831 | 1E-135 >gbIAAD4O139.11AF149413_20 (AF149413) similar to malate | | |
| | | dehydrogenases; Pfam PF00390, Score = 1 290.5. E0, N1 [Arabidopsis thaliana] | | |
| | | Length = 588 | | |
| 832 | 2025832 | 5E-28 >dbjjBAAl3l35j (D86598) antifreeze-like protein (af7O) \|Picea | | |
| | | abies]Length = 779 | | |
| 833 | 2025833 | 3′ Tyr_Phospho_Site(548-554) | | |
| 834 | 2025834 | 5′ 3E-55 >gij3522931 (AC002535) Na+ICa2+exchanger [Arabidopsis | | |
| | | thaliana]Length = 538 | | |
| 835 | 2025835 | 5′ Wd Repeats(44-58) | | |
| 836 | 2025836 | 5′ Pkc Phos ho Site 32-34 | | |
| 837 | 2025837 | Tyr_Phospho_Site(62-69) | | |
| 838 | 2025838 | 4E-48 >gi\|2739044 (AF024651) polyphosphoinositide binding protein | | |
| | | Sshlp [Glycine max]Length = 324 | | |
| 839 | 2025839 | 9E-23 >spjP29 1 O2fLEU3BRANA 3-ISOPROPYLMALATE | | |
| | | DEHYDROGENASE PRECURSOR (BETA-IPM DEHYDROGENASE) (IMDH) (3- | | |
| | | IPM-DH) >gij8l 6761pir1152051 0 3-isopropylmalate dehydrogenase (EC 1.1.1.85) | | |
| | | precursor - rape >gi 117827 IembICAA42596 I (X59970) 3-isopropylmalate | | |
| | | dehydrogenase [Brassica napusi | | |
| 840 | 2025840 | Pkc_PhosphoSite(2-4) | | |
| 841 | 2025841 | 2E-27 >gbIAAD29832.1 1AC006202 10 (AC006202) carbonic anhydrase | | |
| | | [Arabidopsis thaliana]Length = 248 | | |
| 842 | 2025842 | Tyr_Phospho_Site(1 194-1201) | | |
| 843 | 2025843 | 8E-80 >gbIAAD48948.1 IAFi 47262.91 (AF147262) contains similarity to Pfam | | |
| | | family PFOO400 -WD domain, G-beta repeat; score37.6, E2.9e-07, N = 3 | | |
| | | (Arabidopsis thaliana]Length = 728 | | |
| 844 | 2025844 | 1E-102 >emblCAB45976.1 I (AL080318) copper amine oxidase-like protein | | |
| | | [Arabidopsis thaliana]Length = 756 | | |
| 845 | 2025845 | Pkc_Phospho_Site(64-66) | | |
| 846 | 2025846 | Tyr_Phospho_Site(41 5-422) | | |
| 847 | 2025847 | 1E-75 >embICAA648I9I (X95572) salt-tolerance protein [Arabidopsis | | |
| 850 | 2025850 | 7E-13 >gif3643807 (AF062071) zinc finger protein ZNF216 [Mus | | |
| | | musculus]Length = 213 | | |
| 851 | 2025851 | Pkc_PhosphoSite(246-248) | | |
| 852 | 2025852 | 5′ 4E-80 >gi\|3264805 (AFO7I 788) phosphoenolpyruvate carboxylase | | |
| | | [Arabidopsis thaliana]>gif4O7963OjembjCAAl 04861 (AJ 131710) phospho enole | | |
| | | pyruvate carboxylase [Arabidopsis thaliana]Length = 968 | | |
| 853 | 2025853 | 5′ 2E-28 >gi\|58817151dbj1BAA84406.1I (AP000423) ribosomal protein L33 | | |
| | | [Arabidopsis thaliana]Length = 66 | | |
| 854 | 2025854 | 1E-11 >dbjlBAA24382l (ABOOl 389) CLBI [Lycopersicon esculentumi | | |
| | | Length = 505 | | |
| 855 | 2025855 | Tyr_Phospho_Site(342-349) | | |
| 856 | 2025856 | 2E-14 >embICAB56l46.1l | (AL117669) large secreted protein | |
| | | I$treptomyces coelicolor A3(2)]Length = 809 | | |
| 857 | 2025857 | 4E-69 >gi\|2914700 (AC003974) tRNA-processing protein SEN3-like | | |
| | | Arabido sis thaliana Len th = 1004 | | |
| 858 | 2025858 | 5E-16 >9114191 794 (AC005917) zinc finger-like protein [Arabidopsis | | |
| | | thaliana]Length = 682 | | |
| 859 | 2025859 | Pkc_PhosphoSite(102-104) | | |
| 860 | 2025860 | 1 E-74 ) >gij2088653 (AFOO21 09) Hsl pro-i related protein isolog | | |
| | | [Arabidopsis thaliana]Length = 435 | | |
| 861 | 2025861 | 1E-26 >gi\|2688824 (U93273) auxin-repressed protein [Prunus | | |
| | | armeniaca]Length133 | | |
| 862 | 2025862 | 3E-66 >spIPl 7S62IMETLARATH S-ADENOSYLMETHIONINE SYNTHETASE | | |
| | | 2 (METHIONINE ADENOSYLTRANSFERASE 2) (ADOMET SYNTHETASE 2) | | |
| | | >gij99756jpir1jJQ0410 methionine adenosyltransferase (EC 2.5.1.6) 2 - | | |
| | | Arabidopsis thaliana >gi 1166874 (M3321 7) 5-adenosylmethionine synthetase | | |
| | | (sam-2) [Arabidopsis thalianal >gi\|45585541gb1AA022647.1 IACOO7I 38_11 | | |
| | | (AC007138) 5-adenosylmethionine synthase 2 [Arabidopsis thaliana]Length = | | |
| | | 393 | | |
| 863 | 2025863 | Tyr_Phospho_Site(514-520) | | |
| 864 | 2025864 | 3′ Tyr_Phospho_Site(435-442) | | |
| 865 | 2025865 | 3′ Tyr_Phospho_Site(670-676) | | |
| 866 | 2025866 | 5′ 9E-1 1 >gij2344901 (AC002388) serine/threonine protein kinase | | |
| | | isolo Arabido sis thaliana Len th = 762 | | |
| 867 | 2025867 | 5′ Tyr_Phospho_Site(874-881) | | |
| 868 | 2025868 | 5′ Tyr_Phospho_Site(769-777) | | |
| 869 | 2025869 | 5E-57 >gi\|21 60694 (U73528) B′ regulatory subunit of PP2A [Arabidopsis | | |
| 870 | 2025870 | 1E-103) >gi\|2109293 (U97568) serine/threonine protein kinase | | |
| | | [Arabidopsis thaliana]Length = 347 | | |
| 871 | 2025871 | Pkc PhosphoSite(180-182) | | |
| 872 | 2025872 | 1E-45 >gbIAAB81 870fAAB81 870 (AC002983) phosphoglyceride transfer | | |
| | | protein [Arabidopsis thaliana]Length = 301 | | |
| 873 | 2025873 | Tyr_Phospho_Site(823-829) | | |
| 874 | 2025874 | 9E-76 >embl0AB367231 (AL035522) 0-methyltransferase-like protein | | |
| | | [Arabidopsis thaliana]Length = 382 | | |
| 875 | 2025875 | 1 E-31 >embICAAO6997.1 I (AJ006376) subtilisin-like protease [Lycopersicon | | |
| | | esculentum]>gi 13687309 IembICAAO700 1.11 (AJ006380) subtilisin-like protease | | |
| | | [Lycopersicon esculentum]Length = 761 | | |
| 876 | 2025876 | 1 E-109 >piriIS372l2 beta-fructofuranosidase (EC 3.2.1.26) - Arabidopsis | | |
| | | thaliana >giI4O274OIembICAA526 191 (X7451 4) beta-fructofuranosidase | | |
| | | [Arabidopsis thaliana]>gi\|757536 Iemb 1CAA52620 \|(X74515) beta- | | |
| | | fructofuranosidas | | |
| 877 | 2025877 | 2E-35 >gi\|2702277 (AC003033) cyclin g-associated kinase [Arabidopsis | | |
| 878 | 2025878 | 4E-51 >pir11S08534translation elongation factor eEF-1 alpha chain (gene | | |
| 879 | 2025879 | 1E-107 >pir11S65533 | cysteine synthase (EC 4.2.99.8) 3A - Arabidopsis | |
| | | thaliana >gi 1804950 lem bICAA58893I (X84097) cysteine synthase [Arabidopsis | | |
| | | thaliana]>gi\|10961961prf1121 1 1276A Ser(Ac) thiol lyase [Arabidopsis thalia | | |
| 880 | 2025880 | 5E-35 >giI3l 69719 (AFOO7I 09) similar to yeast dcpl [Arabidopsis | | |
| | | thaliana]Length = 370 | | |
| 881 | 2025881 | 1 E-24 >gij40391 53 (AFi 04221)10w temperature and salt responsive | | |
| | | protein LTI6A [Arabidopsis thaliana]>gi\|4325217IgbIAAD17302l (AF122005) | | |
| | | hydrophobic protein [Arabidopsis thaliana]Length = 54 | | |
| 882 | 2025882 | Pkc_Phospho_Site(13-15) | | |
| 883 | 2025883 | Pkc_Phospho_Site(45-47) | | |
| 884 | 2025884 | 3E-74 >embICAB45999.1 I (Z97338) cytochrome P450 like protein | | |
| | | [Arabidopsis thaliana]Length = 477 | | |
| 885 | 2025885 | 1 E-1 33 >gi\|2462753 (AC002292) polygalacturonase [Arabidopsis | | |
| | | thaliana]Length = 540 | | |
| 886 | 2025886 | 3′ 1 E-69 >gi\|3522931 (AC002535) Na+ICa2+exchanger [Arabidopsis | | |
| | | thaliana]Length = 538 | | |
| 887 | 2025887 | 5′ Tyr_Phospho_Site(92-98) | | |
| 888 | 2025888 | 5′ 9E-94 >gi\|4220528jembICAA23001 I (AL035356) glucose-6-phosphate | | |
| | | isomerase [Arabidopsis thaliana]Length = 611 | | |
| 889 | 2025889 | 5′ 5E-33 >giI5454O46IrefINP_006314.1 IpSEC24I secretory protein 24 | | |
| | | >gi\|39476901emb1CAA10335.1I (AJ131245) Sec24B protein [Homo sapiens] | | |
| | | Length 1268 | | |
| 890 | 2025890 | IE-117 >gi\|2353171 (AFOl 5542) sigma factor 1 [Arabidopsis thaliana] | | |
| | | >gi 124434081dbi 1BAA2242 Ij (D89993) SigA [Arabidopsis thaliana] | | |
| | | >gi 1255851 4IembICAA7464O I (Y1 4252) plastid RNA polymerase sigma factor | | |
| | | [Arabidopsis thaliana]>gi 15042421 jgbjAAD3826O. 1 IACOO6I 93 16 (ACOO61 | | |
| 891 | 2025891 | 9E-93 >dbjIBAA84445.1 I (AP000423) ycf I [Arabidopsis thaliana]Length | | |
| | | 1786 | | |
| 892 | 2025892 | 8E-51 >pir11553492 RNA-binding protein cp3l precursor - Arabidopsis | | |
| | | thaliana >gi\|681906IdbjIBAA06520I (D31712) cp3l [Arabidopsis thalianal Length = | | |
| | | 314 | | |
| 893 | 2025893 | SE-71 >gbjAAD22128.1 1AC00622490 (AC006224) SOs ribosomal protein L3 | | |
| | | [Arabidopsis thaliana]Length = 271 | | |
| 894 | 2025894 | 4E-44 >gbjAAD38269.1 1AC00619355 (AC006193) cytochrome P450 | | |
| | | [Arabidopsis thaliana]Length = 510 | | |
| 895 | 2025895 | 2E-63 >embICAA67426I (X98926) thylakoid-bound ascorbate peroxidase | | |
| | | [Arabidopsis thaliana]Length = 426 | | |
| 896 | 2025896 | 1E-30 >dbjjBAA236711 (D89063) oligosaccharyltransferaSe [Mus | | |
| | | musculus]Length = 441 | | |
| 897 | 2025897 | Tyr_Phospho_Site(228-234) | | |
| 898 | 2025898 | 3E-82 >pirIIS20918 probable serine/threonine-specific protein kinase | | |
| | | ATPK64 (EC 2.7.I.-)-Arabidopsis thaliana >gi\|217843IdbjIBAA01731I (D10937) | | |
| | | protein kinase [Arabidopsis thaliana]Length = 498 | | |
| 899 | 2025899 | 8E-76 >sp 1004921 IHMZ2_ARATH FERROCHELATASE II, CHLOROPLAST | | |
| | | PRECURSOR (PROTOHEME FERRO-LYASE) (HEME SYNTHETASE) | | |
| | | >gi 11946377 (U932 15) ferrochelatase precusor isolog [Arabidopsis thai ana] | | |
| | | >gi\|2347202 (AC002338) ferrochelatase pr | | |
| 900 | 202S900 | Pkc_PhosphoSite(17-19) | | |
| 901 | 2025901 | 1E-25 >gij3873408 (L76926) zinc finger protein [Arabidopsis thaliana] | | |
| | | Length = 304 | | |
| 902 | 2025902 | 5′ Tyr_Phospho_Site(462-470) | | |
| 903 | 2025903 | 5′ 2E-82 >gi\|2444271 (AFOl 9637) amino acid or GABA permease | | |
| | | [Arabidopsis thaliana]Length = 516 | | |
| 904 | 2025904 | 4E-67 >dbj(BAA84422.1 I (AP000423) ribosomal protein L16 [Arabidopsis | | |
| | | thaliana Length = 135 | | |
| 905 | 2025905 | 1E-96 >pirIIS35701 translation elongation factor G, chioroplast - soybean | | |
| | | Length 787 | | |
| 906 | 2025906 | Tyr_Phospho_Site(1 072-1079) | | |
| 907 | 2025907 | 1E-33 >gbIAAD45999.11AC00591611 (AC005916) Similar to gb1Z84571 | | |
| | | anthranilate N-hydroxycinnamoyl/benzoyltransferase from Dianthus caryophyl us. | | |
| | | [Arabidopsis thalianal Length 442 | | |
| 908 | 2025908 | Pkc_Phospho_Site(10-12) | | |
| 909 | 2025909 | Tyr_Phospho_Site(918-925) | | |
| 910 | 2025910 | Tyr_Phospho_Site(1165-1171) | | |
| 911 | 2025911 | 4E-82 >gi\|3887237 (AC005169) Cys3His zinc-finger protein [Arabidopsis | | |
| | | thalianal Length = 359 | | |
| 912 | 2025912 | 4E-91 >gi\|3643609 (AC005395) Cys3His zinc finger protein [Arabidopsis | | |
| | | thalianal Length = 315 | | |
| 913 | 2025913 | Tyr_Phospho_Site(1 80-187) | | |
| 914 | 2025914 | 5E-38 >gbIAAD19755I (AC006413) nuclear phosphoprotein (contains | | |
| | | multiple TPR repeats prosite:Q00050005) [Arabidopsis thaliana]Length = 1115 | | |
| 915 | 2025915 | Tyr Phospho S,te(31-39) | | |
| 916 | 2025916 | Tyr_Phospho_Site(619-625) | | |
| 917 | 2025917 | 4E-85 >pir11S57784 4-coumarate-CoA ligase (EC 6.2.1.12) - Arabidopsis | | |
| | | thaliana >gi\|609340 (U18675) 4-coumarate----coenzyme A ligase [Arabidopsis | | |
| | | thaliana]>gij57021 84IgbIAAD471 91 .1 AFi 06084_1 (AFi 06084) 4-coumarate:CoA | | |
| | | ligase I (Arabidopsis thaliana]Length = 561 | | |
| 918 | 2025918 | T r Phos ho Site 1401-1409 | | |
| 919 | 2025919 | Tyr_Phospho_Site(165-171) | | |
| 920 | 2025920 | Tyr_Phospho_Site(218-225) | | |
| 921 | 2025921 | 3′ Tyr_Phospho_Site(167-173) | | |
| 922 | 2025922 | 5′ Pkc_Phospho_Site(1 16-118) | | |
| 923 | 2025923 | 5′ 1 E-75 >gij6l 1 9523Igb1AAF041 67.1 jACOI 15608 (ACOI 1560) amino acid | | |
| | | transporter [Arabidopsis thaliana]Length = 584 | | |
| 924 | 2025924 | 5′ 4E-22 >gi\|495366embjCAA933l6j (Z69370) nitrite transporter [Cucumis | | |
| | | sativusi Length 484 | | |
| 925 | 2025925 | IE-82 ) >gi 2829900 (AC002311) similar to ripening-induced protein, | | |
| | | gpjAJ001449 2465015 and major latex protein, gpIX91961 1107495 [Arabidopsis | | |
| | | thaliana]Length 148 | | |
| 926 | 2025926 | Tyr_Phospho_Site(270-276) | | |
| 927 | 2025927 | Tyr_Phospho_Site(902-910) | | |
| 928 | 2025928 | Tyr_Phospho_Site(477-483) | | |
| 929 | 2025929 | Pkc_Phospho_Site(39-41) | | |
| 930 | 2025930 | Tyr_Phospho_Site(214-222) | | |
| 931 | 2025931 | 5E-52 >dbjjBAA33I96j (ABOl 7564) dof zinc finger protein [Arabidopsis | | |
| | | thaliana]Length = 194 | | |
| 932 | 2025932 | 1 E-69 >gbjAAD28777.1 1AF1341301 (AF134130) Lhcb6 protein [Arabidopsis | | |
| | | thaliana]Length = 258 | | |
| 933 | 2025933 | Tyr_Phospho_Site(333-340) | | |
| 934 | 2025934 | 2E-58 >gbiAAFOO665.11AC00815397 (AC008153) 40S ribosomal protein s14 | | |
| | | [Arabidopsis thaliana]Length = 150 | | |
| 935 | 2025935 | Tyr_Phospho_Site(622-628) | | |
| 936 | 2025936 | 1E-89 >dbjIBAA84424.1 I (AP000423) ribosomal protein L22 [Arabidopsis | | |
| | | thaliana]Length = 160 | | |
| 937 | 2025937 | 8E-82 ) >gi\|1946360 (U93215) elicitor response element binding protein | | |
| | | WRKY3 isolog [Arabidopsis thaliana]Length = 380 | | |
| 938 | 2025938 | 5′ Pkc_Phospho_Site(190-192) | | |
| 939 | 2025939 | Tyr_Phospho_Site(1103-1110) | | |
| 940 | 2025940 | 1E-1 14 >gi\|321 2875 (AC004005) polygalacturonase [Arabidopsis | | |
| | | thaliana]Length = 394 | | |
| 941 | 2025941 | 1E-67 >embICAA2003OI (ALO31 135) protein kinase - like protein | | |
| | | [Arabidopsis thaliana]Length = 356 | | |
| 942 | 2025942 | 1E-1 17 >gbIAADI 81091 (AC006403) protein kinase [Arabidopsis thaliana] | | |
| | | Length = 407 | | |
| 943 | 2025943 | Tyr_Phospho_Site(288-296) | | |
| 944 | 2025944 | 4E-93 >gbIAADI 73671 (AF128396) contains similarity to Medicago | | |
| | | truncatula N7 protein (GB:Y1 761 3) [Arabidopsis thaliana]Length 317 | | |
| 945 | 2025945 | Pkc_Phospho Site(1 30-132) | | |
| 946 | 2025946 | 1 E-159 >gi\|2340166 (AFOO8 124) glutathione S-conjugate transporting | | |
| | | ATPase [Arabidopsis thaliana]>gi\|2459949 (AF008125) multidrug resistance- | | |
| | | associated protein homolog [Arabidopsis thaliana]Length = 1622 | | |
| 947 | 2025947 | Tyr_Phospho_Site(1 152-1158) | | |
| 948 | 2025948 | Tyr_Phospho_Site(671-678) | | |
| 949 | 2025949 | 1E-13 >gbIAAD237I8.11AC005956_7 (AC005956) zinc finger protein | | |
| | | [Arabidopsis thaliana]Length = 217 | | |
| 950 | 2025950 | Pkc_Phospho_Site(37-39) | | |
| 951 | 2025951 | 2E-18 >gbIAADI6006.1I (AF078035) translation initiation factor 1F2 [Homo | | |
| | | sapiens]Length = 1220 | | |
| 952 | 2025952 | 6E-99 >gi 139831 25 (AF097648) phosphate/triose-phosphate translocator | | |
| | | precursor [Arabidopsis thaliana]Length = 410 | | |
| 953 | 2025953 | Tyr_Phospho_Site(1 72-179) | | |
| 954 | 2025954 | 4E-61 >emblCABIO33l .11 (Z97339) pyruvate, orthophosphate dikinase | | |
| | | Arabido sis thaliana Len th 960 | | |
| 955 | 2025955 | 3′ Tyr_Phospho_Site(635-643) | | |
| 956 | 2025956 | 3′ Tyr_Phospho_Site(592-599) | | |
| 957 | 2025957 | 3′ Pkc_Phospho_Site(94-96) | | |
| 958 | 2025958 | 5′ Tyr_Phospho_Site(463-470) | | |
| 959 | 2025959 | 5′ 1 E-1 1 >giJ6321 OO7lrefINP_011086.1 IBUR6I Transcriptional regulator which | | |
| | | functions in modulating the activity of the general transcription machinery in vivo; | | |
| | | Bur6p >gi\|731531jspIP40096jNCB1_YEAST CLASS 2 TRANSCRIPTION | | |
| | | REPRESSOR >gij1077721jpirjjS50662 hypothetical protein YER159c - yeast (Sa | | |
| 960 | 2025960 | 1 E-92 >gb(AAD22 126.1 lACOO622kfi (AC006224) pectinesterase [Arabidopsis | | |
| | | thaliana Length = 518 | | |
| 961 | 2025961 | 2E-14 >gij1572819 (U70855) similar to the RAS gene family | | |
| | | | [Caenorhabditis elegansi Length = 625 | |
| 962 | 2025962 | 1 E-33 >gbIAADI 74151 (AC006248) serinefthreonine kinase [Arabidopsis | | |
| | | thaliana]Length = 365 | | |
| 963 | 2025963 | Rgd(742-744) | | |
| 964 | 2025964 | 1E-62 >gbIAAD258O5.1jAC006550_13 (AC006550) Contains FF100010 helix- | | |
| | | loop-helix DNA-binding domain. ESTs gblT45640 and gbjT22783 come from this | | |
| | | gene. [Arabidopsis thaliana]Length = 297 | | |
| 965 | 2025965 | Tyr_Phospho_Site(403-41 0) | | |
| 966 | 2025966 | 2E-82 >gi\|31 76680 (AC003671) Identical to polygajacuronase isoenzyme | | |
| | | I beta subunit homolog mRNA gb1U63373. EST gbjAA404878 comes from this | | |
| | | gene. (Arabidopsis thaliana]Length = 626 | | |
| 967 | 2025967 | 3E-85 ) >gbfAAD223O9.1 1AC007047_18 (AC007047) beta-ketoacyl-CoA | | |
| | | synthase [Arabidopsis thaliana]Length 512 | | |
| 968 | 2025968 | 2E-57 >gbIAAD29842.1 jAF0646941 (AF064694) catechol 0-methyltransferase; | | |
| | | Omt ll;THATU;2 [Thalictrum tuberosum]Length = 362 | | |
| 969 | 2025969 | Pkc_PhosphoSite(43-45) | | |
| 970 | 2025970 | 6E-29 >dbjjBAA32422I (AB008107) ethylene responsive element binding | | |
| | | factor 5 [Arabidopsis thaliana]Length = 300 | | |
| 971 | 2025971 | Pkc_Phospho_Site(164-166) | | |
| 972 | 2025972 | Pkc_Phospho_Site(36-38) | | |
| 973 | 2025973 | 3′ 1E-48 >gi\|2129516jpir1 jS59548 1-aminocyclopropane-1-carboxylate | | |
| | | oxidase homolog (clone 2A6) - Arabidopsis thaliana >gi\|5996221emb1CAA581 511 | | |
| | | (X83096) 2A6 [Arabidopsis thaliana]>gi\|2809261 (AC002560) F21 B7.30 | | |
| | | [Arabidopsis thaliana]Length = 361 | | |
| 974 | 2025974 | 3′ 5E-47 >gi\|3650034 (AC005396) flavonol sulfotransferase | | |
| | | [Arabidopsis thaliana]Length = 333 | | |
| 975 | 2025975 | 3′ Tyr_Phospho_Site(371-378) | | |
| 976 | 2025976 | 3′ Pkc_Phospho_Site(144-146) | | |
| 977 | 2025977 | 5′ 3E-97 >gi\|1103318(embjCAA55395( (X78818) casein kinase I [Arabidopsis | | |
| | | thaliana]>gij2244791(emb(CAB1O213.1I (Z97336) casein kinase I [Arabidopsis | | |
| | | thaliana Len th = 457 | | |
| 978 | 2025978 | 5′ Pkc_Phospho_Site(9-1 1) | | |
| 979 | 2025979 | 5′ Wd Repeats(14-28) | | |
| 980 | 2025980 | 5′ 8E-16 >gij45O6Ol3jrefINPOO27O3.IJpPPPIR7j protein phosphatase 1, | | |
| | | regulatory subunit 7 >gij2136139jpirjj568209 sds22 protein homolog - human | | |
| | | >giI108S028\|emb\|CAA9O626I (Z50749) yeast sds22 homolog [Homo sapiens] | | |
| | | >giJ4633067\|gb\|AA02661 1.11 (AF067136) protein phosphatase-1 regulatory | | |
| | | subunit 7 | | |
| 981 | 2025981 | 5′ T r Phos ho Site 441-449 | | |
| 982 | 2025982 | 6E-67 ) >gi\|1477480 (U40341) carbamoyl phosphate synthetase large | | |
| | | chain [Arabidopsis thaliana]Length = 1187 | | |
| 983 | 2025983 | 4E-50 >gi 141 85141 (AC005724) calmodulin-binding protein [Arabidopsis | | |
| | | thaliana]Length = 652 | | |
| 984 | 2025984 | Tyr_Phospho_Site(650-657) | | |
| 985 | 2025985 | 8E-15 >gi\|3264767 (AF071893) AP2 domain containing protein [Prunus | | |
| | | armeniaca]Length = 280 | | |
| 986 | 2025986 | Pkc_Phospho_Site(8-1 0) | | |
| 987 | 2025987 | Pkc_Phospho_Site(172-174) | | |
| 988 | 2025988 | 2E-25 >gbIAAD1741 5\|(AC006248) serine/threonine kinase [Arabidopsis | | |
| | | thaliana]Length = 365 | | |
| 989 | 2025989 | 1 E-91 >gi\|2924792 (AC002334) similar to synaptobrevin [Arabidopsis | | |
| | | thalianal Length = 221 | | |
| 990 | 2025990 | Tyr_Phospho_Site(947-953) | | |
| 991 | 2025991 | Tyr_Phospho_Site(2-9) | | |
| 992 | 2025992 | Tyr_Phospho_Site(41 9-426) | | |
| 993 | 2025993 | 5E-47 >gbIAAD25856.1 JAC007197′ 9 (AC007197) dynamin-like protein ADL2 | | |
| | | [Arabidopsis thaliana]Length = 782 | | |
| 994 | 2025994 | 5′ 8E-97 >giIl 345132 (U47029) ERECTA [Arabidopsis thaliana] | | |
| | | >giIl389566IdbjIBAAl 18691 (D83257) receptor protein kinase [Arabidopsis | | |
| | | thaliana]>g 13075386 (A0004484) receptor protein kinase, ERECTA [Arab idopsis | | |
| | | thalianal Length = 976 | | |
| 995 | 2025995 | 5′ 2E-97 >gi\|23399781embJGAA721771 (Y11336) RGA1 protein [Arabidopsis | | |
| | | thaliana]Length = 587 | | |
| 996 | 2025996 | 5′ Tyr_Phospho_Site(898-905) | | |
| 997 | 2025997 | 5′ 3E-57 >gif1765899lembj0AA692221 (Y07917) Spot 3 protein [Arabidopsis | | |
| | | thaliana]>gi\|1839244 (U86700) EGE receptor like protein [Arabidopsis thaliana] | | |
| | | Length = 623 | | |
| 998 | 2025998 | 2E-77 >emb10AB45976.1 (AL080318) copper amine oxidase-like protein | | |
| | | [Arabidopsis thaliana]Length = 756 | | |
| 999 | 2025999 | 2E-70 ) >gif3522929 (AC002535) dTDP-glucose 4-6-dehydratase | | |
| | | [Arabidopsis thaliana]>gif3738279 (AC005309) dTDP-glucose 4-6-dehydratase | | |
| | | [Arabidopsis thalianal Length = 443 | | |

The application's sequence listing, which the Patent Office published only in electronic form, follows.

SEQUENCE LISTING (999 sequences)

SEQ ID NO: 1 - DNA, 596 bp, Arabidopsis thaliana
ttttttttttttttttttttctcaagaactacaagtttatttctcaaaccaaaaaaaatggtgtaacaaggatttgaattaggacgaggttcttcccactgaattggcaaagtctataaaaagacccaaaaataatacaatgaaaaggagaaaagacagaagcaaatattggagatcactaagatgcgcatgttgatcactgctgggcacattgcacacgctgagcaccgcctgggtgatcttcctcatcgtcatcataagcctctctttgagcttgcgccttccttttcatctcatcctcaatgttcacatcatgcagagtcgtctcttcgcagtcgtctatttccatatcgcttatagctgccttggttggctttggcaaaactgcttcaatggcctttgtctgatccgggctcagcgattccgggaattcaaccgtgaagtgaatgtatagcttacccttcatgaacggcctttggtatattggcattccctcatcacttatcgccttgtatgaatcaggtttgacgacctctccgggcttggatttgatgagaagctgtcttttgtccaaatgggtcaagacaaactggaag

SEQ ID NO: 2 - DNA, 596 bp, Arabidopsis thaliana
  misc_feature (1)...(596): n = A,T,C or G
gcaggtaaaacgttacaatggcttctaaggctcttgcagttacagctcttcttattacacttaatcttcttttcttcaccnnnnacctccacaaaatgtccaccaactactcctaaacccccaaaaaccccgaaatcgcctaagaaggctcctgccgtgaaacccacttgtcctaccgacacacttaagcttggtgtttgcgcagacttattgggcctagttaacgttgttgttggttctccaccaaagactccttgttgtacacttcttcaaggtcttgctaatcttgaagctgcggtttgtctctgcaccgctcttaaagccaatgtcttggggattaatctcaatgttcctattgatctaaccttgctgttgaactattgtggcaagaaagttcctcatggtttccaatgttcttgaagatttgagactttaaaagagaaaaatctctttggtttgctatgtttttatatgtttgtttctactgttatctattgtttttgtgagaaaaagctttgttctgtcactgttgagtttgatgtaatgcttgagcttgttcatgatagaacctttgttctctcaatattgagtttgat

SEQ ID NO: 3 - DNA, 596 bp, Arabidopsis thaliana
cttcgtctccgtctccatctttgtctccggtaagtaactgaaagatggggcgtgttagaaccaagaccgtgaagaaatcttctcgtcaagtcattgagaagtactactctcgcatgactcttgactttcacactaacaagaagatccttgaagaggttgccatcatcccatcaaagagactccgcaacaagattgctggattctccacccacttgatgaaacgtatccagaagggaccagtccgtggaatctcactcaagcttcaagaagaagagcgtgaacgccgtatggactttgttcccgatgagtctgctatcaagactgatgagatcaaggtcgacaaagagactcttgagatgcttgcttctctaggaatgtctgacactctcggcatctctgcagtcgacccacaacaagctatggcaccaatccctgctttcggcggcggcagggcacccagaagatactaagatggacgattggctctcttttttcacagttagggacaagaaagacttgtgtggttgtttattgtttcttttgattatgtcttaaactcaatgtgagactctttcgtattaatggtttttgagtta

SEQ ID NO: 4 - DNA, 596 bp, Arabidopsis thaliana
ttttttttttttttaactcagaatgtggtctttgataagatacgtttaaaaggcaagatcaagctgtcacaaggtcatgatcaagctgcagaacacaatacaaatggaaattgaattgcttacacctaagcatcacagagagtgttatcaattcttccaactatatataacctagagttcagcttctttgttcccggaaacaccaagaagcttggcgagttcaccgctctcatacgcatctacggtatcatctgatcctccgagatgttttccgttaatgaagacttgcggtactgttcgccttccaacaatctctccaagtgcagtctggatgctccaaccatcttctctttcatcaagctcgacaacataaggaacttgatccagctctctgaacactgatttagctttcttgcagtaggggcagtaggatttggagaaaatgacgatcttatgggaagagatagtcttcttaacaaagtcggcttctggggacgaagcagcagaagaaaccatagaaatgaatgtaactagtgcgacgagcagcattaccatggagatagatctaaacattgtcatggctcctttcttcttct

SEQ ID NO: 5 - DNA, 596 bp, Arabidopsis thaliana
gaaaaccagagatggcgatgacgacagcatctacggtatttgttctaccggccaatgtcacctcggtcgccggcgcttcgtcgtccaggagctccgtgtctttcttgccgatgagaaacgccggttctaggctcgtagtcagggcagccgaagatcctgctccggcttcctcttcttcaaaagattctccggcagctgccgctgctccggatggagctactgccaccaaacccaagccaccaccgattggtcctaagagagggtctaaggtcaagattctaaggagagaatcctattggttcaagaacgttggatcagttgttgccgttgatcaggaccctaagactcgatacccggttgtggtccggttcgcaaaagtcaattacgccaacatatcgaccaacaactatgcattggatgaggtcgaagaagttgcagcttaaatgggagaattcaaaaactctgtgtattctataccggtttatccgtttgtaacttgacccaaaccgtatgtaccgcaaaagtttaccaattatttctcctcatctgaatctcgagccggttttcttattctttcaaaaaaaaaaaaaaaaaaa

SEQ ID NO: 6 - DNA, 596 bp, Arabidopsis thaliana
ctttttttttttttttttttttacaagaaacaacaatatggatagaaatattcagaggaaagtaaaagataagataggattttttaatgtttttttttggttattctccaattattttatgaaataaacttgtgattataaactaatgaagagagcaagaaaaaaagtgataaaaaagcgaaagtcacgtgtcaagtgaacaatcttatcttactagatttgtgacaatgccaaactgtcctccacaaatagaggcccttcttttcttcgatacgtggaccccactaaacccatattccaccaattatattttattgttctctttttatatctataaaaaaaagtcaccgaggaagagctcgccggagaaactgagcaagctgcgccggagcactaagctgcggcaaatgtccttcagttttaagagtctccacagtagtatctccaccgagatgagacctaagatactccgccaccgaagccggcacagaaacatccttcgccgtctgaatcacacacgtcggaactctaactaacccaagcacacctctcagatcgctgttgaaaaccgtcctcgaaacaaacagaggtatatc

SEQ ID NO: 7 - DNA, 596 bp, Arabidopsis thaliana
ctttttttttttttttggtgaaattctctggtttttatattgaatgtttaaaagaagtcacattgaacaacattgagaaagatcttaaacgaaaacaactatcgagattggagaaagcttattgagaagtggttctcaatcttcgaagctgatcaatccaacgatcctcattaacatcggaggcccaatcaggagccgttccagggaatgagatggctcgcattgcctccataaccctaacggcattctcctccactaacggcgatcttctccgccgttcgtcctcctcaaacgctctacggatctccggtccagtctccgtctctgtctcttcttcgctgtctgtgttatcgtttatactaatagaagagattcctacctctgcatccggaatcatacaatggccgttagagagaccatctccaccgatcggaagataactgtcttcttcatcgtcgttggagttatataaatcgacggctgagatcggttcgtaatagtcttgtgaatcttcgacggaattagagtcggaatcgctcccggcgttgttgttctcttccatagacccttcgatgggatcaatcacctggagacga

SEQ ID NO: 8 - DNA, 595 bp, Arabidopsis thaliana
ctttttttttttttttttttttttttagttatctgaatggtgttgtgttcttatcataataaagttgctacctttacatctttattccatagaagaaatttttgagagctttaagatagaatgttatcatcatcactaagaaataatatttgatgtattgtgtagataatcaaaacaaaacttgtagaaaatacgattaaggtccataatcaaactcgttatagaagccaggatttatataagaattgaaacaatcgaatattacgtcttcctcagtcgctaacttgccggaatcttgacacccaaaatacgtctggatatcgtcggggaagctccggcgagttggaatcacttccggcgatgtagatggttcgattacttcctctgatttcggagatttgttatcatccgacgattcgggctcgcgactagggcttcgaatgggcttagaatcggaatcggctttatccgcggcggcgttagggtttagataacggctgacgtcgaaattggtaacggcgttaagtccacggtactctattgccgcgatgtcgtaggcgattgctgcttcttcttgcgtggctgcacgtgcaca

SEQ ID NO: 9 - DNA, 595 bp, Arabidopsis thaliana
  misc_feature (1)...(595): n = A,T,C or G
tgctgttgaaaggataagagaaataaccggtggtatgggtgttgatgttgctgttgaagccttgggaaagcctcaaactttcatgcagtgcacactaagtgtgaaagatggtggaaaagctgtgatgattggactctcacaagctggttccgttggagaaattgacataaatcgacttgttcgtagaaagataaaagttataggatcttatggaggaagagcaagacaggatcttcctaaagtagtgaaattggcagagtcagggattttcaatctcacaaacgcagtctcaagtaaatacaagtttgaagatgcaggaaaagcatttcaagatctcaacgaaggcannntcgtgagccgaggtgttgttgagatactataaccaatagccttttgattctggtttgtgaatgactgcttcacacctgtttcactgaggtctattnntagttgctacaatcttcagacaaggtcattgttaatctgatatttgtgtttgtttagacagtgaaaaggaaaaaaaaactgtagtaactggacaaaatttataattttactgtttttcatttctttccaacaaaaaaaaaaaaaaaaa

SEQ ID NO: 10 - DNA, 595 bp, Arabidopsis thaliana
cactgctgtgacggaatggcagcatgttgttctatcaccagataagaaagtgctggtttttgaaacagtgcaacagccacatgatgttccttttggttcttactttgaggtccactgtcgatggcgcttggaagctaaagacgagacttcatctgttatagatataagagtcggtgtacatttcaagaaatggtgtttgatgcaatcgaagattaaagcaggggcaattgacgagtacaagaaagaagtggaagtgatgctagaagtggcattgtcgtatctcaagtcacactcttcctcaagtagccatggtgatatagacaagtctgctctatcatctccaacaccagaaaacatcagctaaaacctaatttaccaaaatcaaaaagcttctcaaagtttcattctccagccagctaattaagatcatccaccatcatttttcttcttcttttacatgttaaagtgtatatgtggtaacagtaattatgaatggatatttacagaggcttgtctgatttctggtacttgtgacaataacaaaggaaaagtttgggttctctcacaactctatttgtattggcaaatacaaagt

SEQ ID NO: 11 - DNA, 595 bp, Arabidopsis thaliana
tttgtataaagatatatagtgttgttccatcacaaaaagatgatctatgctaatatacatagagttatactggaattaatacaacaaacattctgccgacatagattaaaactaccaattagttggtactttccacttcatcactaaaccaatctgaaccagaaccccaatcacattgcgtgtacttttctttcggtaagaaccggtgccgacaaaccggacatttcatcttgttgtagtcaacgatccaacggtctaaacaatgatgatgaaacacgtgtccacacttgggtagctgcctaaccttatcgtcggactcaaaatctgacaaacaaaccgtacaacaatcttccggatcggtcggaagatccgagaaccgaaccaccgggatcaactcgttagcaagactcgctgacgtagagagagcgtgtcgggtcggatcgggtccagaggtctcgttgtggtctagaaaactaggtagaccaatgtaaggacaaagagcatcgaccatgtctctaaagaaaccgatgacgtaaagtatctttaatatgtaacctggaatctgaagctcggtgatgaaatcttcaggaagacc

SEQ ID NO: 12 - DNA, 595 bp, Arabidopsis thaliana
ggtaaaagccttggtcctcatgaaaccgggaagcccaagtacttacttccaccatcaaatcgtcaaaccatttgcaaccatcgatggtggtcatgtcacgagtaagcttctactcttctttcttgctactactgttagaggtcgttgtcgctagcagcgagtttgatgatgaaggaagaacatcgttcagtccaaccacggctataatcatgatcgtactcgttagtgttttcttcgcacttggatgtatctccgtctacatgaggaggtgtctccagcacgctctggggatggacagcggtggtggtccaggaaactggcttaacgtgaggcaaacgacggagcctgggctagacgcgtctgttatagaaacgtttccaacgtttccttactctacagtgaagacgttgaggatcggtaaagaagctttggagtgtcccgtttgtctcaacgagttcgaggacgacgaaacgctgcgtttgattcctcagtgttgtcacgtgtttcatcctggttgcattgatgcctggctccgttctcagaccacatgtcctctttgccgagccaatctcgttcctgtacctcggccgcgacc

SEQ ID NO: 13 - DNA, 595 bp, Arabidopsis thaliana
  misc_feature (1)...(595): n = A,T,C or G
ccacgcgtccggaagtttttaggagaaggaaatgatggcgtcggatccaaaactgaaggctgagatcggagccgatggtcttgcaagagaagctcctgttattgcttacacagagaagataatcgaggaagagcaagttcagctgaggaaatacattgaggagaactatacaaaaattagggatgttgaaagggaatttggaaacctttcaatggaattgaaactcactgctggacctaagaaagcagcaatggaacacttgagaaagaaaatcgaagtctcaactgaaaggatccatgctgctaagttgaaagaagaagaagcgcgaaaggcatttgaagcagcatcaaaagttgtgaaggatgaagaagcaacaannnngagtctttgcgaagatttaaacagtctggtacaacaaagcagcaatacgcagtacgccagacttgaggaantgaaaagaagactagaagcgttgaatccaaatcgatcatctacttctattcagcaagtgcaagaaccggagactaaatctgtagtagacagcgcaccagcagccaatgcgaaccaaactcacccgggaaaacctgaaaataac

SEQ ID NO: 14 - DNA, 595 bp, Arabidopsis thaliana
agcctctgaagatactaatgtctatgatgacttggtcagataccttctgatggttagacagaaggtgaaggaacccaaggtggatagtgagctcatctatgcttatgcaaagattgaaaggttgggtgagattgaagaatttattctgatgcccaacgttgccaaccttcaacatgttggtgaccgtttgtacgatgaagctctgtatgaggctgcaaagataatatatgcattcatatcgaattgggccaagttagccgtcacccttgtgaagttgcaacagttccaaggtgctgttgatgctgcaaggaaagcaaacagtgcaaagacatggaaggaagtctgctttgcttgtgttgatgctgaggaattccgactggctcaaatctgtggacttaacattatcatacaggtggatgacctggaagaagtaagcgagtactaccagaacagaggatgcttcaatgaattgatctcccttatggagagtggacttggtctggaacgtgctcacatgggtatcttcaccgagttaggagtactgtacgccagatatcgttatgagaagcttatggaacacatcaagttgttctct

SEQ ID NO: 15 - DNA, 595 bp, Arabidopsis thaliana
cttttttttttttttttttttttttttttttttgttaggaactatatagcttcatttatgtgatttacaggctttgtaatgttacaaaaacttttctatcgaagaggagctattagagtaggatacatatcttaatcccttgttatttgaaggttgttgcaatcaagaagatggatttacctacgtttaaaaaggctgacggagaaagagaatttcgtgtggaggtggatatcttgagcagactcgaccacccaaatctggtctctttgatcggctattgtgcagatgggaaacaccggttcctagtatatgaatatatgcaaaatggaaacctctactaagatcatataaacaataggtcgaagcaaacgggattatcaacccgtacccttggtcatgtcacatttagctcccatgtttacacatttgcagaggaggtcagctcattatcagaccccaccatttctactataggattggtgcatagtggaagaagcttcttccgcatcaaatgcttacgccgctgtaacatcagaaggaccaaaactgtatctgtcttaacaacctcgtatcctgccttcttgtacatattgaa

SEQ ID NO: 16 - DNA, 595 bp, Arabidopsis thaliana
  misc_feature (1)...(595): n = A,T,C or G
aattcttaccaggaagaaccgacaacgagatcaaaaactattggcattctaatctaaagaagggtgtaactttgaaacaacatgaaaccacaaaaaaacatcaaacacctttaatcacaaactcacttgaggccttgcagagttcaactgaaagatcttcttcatctatcaatgtcggagaaacgtctaatgctcaaacctcaagcttttcgccaaatctcgtgttctcggaatggttagatcatagtttgcttatggatcagtcacctcaaaagtctagctatgttcaaaatcttgttttaccggaagagagaggattcattggaccatgtggccctcgttatttgggaaacgactctttgcctgatttcgtgccaaattcagaatttttgttggatgatgagatatcatctgagatcgagttctgtacttcntnttcagacaacttnntgttcgatggtctcatcaacgagctacgaccaatgtaaatgttcggagagaggtccaantaaatatagtttagggtttaatttaagtagacggggataaaaaagagtacataaacaaatactttgtatgcccaacaaatctgtaa

SEQ ID NO: 17 - DNA, 595 bp, Arabidopsis thaliana
agccgccgcctctgcgattcccatcgcgatcgccttctcttcttcttcttcttcttcctctaccaaccccaaatctcaatctctcaatttctccttcctctcccgatcgtctccacgtctcttgggactttcacgaagcttcgttagctctccgatggcgactgctctcacttctgatcgtaatctccatcaggaggatcgagccatgcctcagcttcttactgagtttatggtggatatgacatgtgagggttgtgttaatgctgtgaagaacaaattagaaaccattgaaggtattgagaaagtggaggtggatttgtccaatcaagttgtgaggatacttggatcttcccctgttaaggctatgactcaagctttggagcaaactggtcgaaaagctcgcttaattggacaaggtgttcctcaagatttcttagtctcagctgcagtagcagaattcaaaggccctgacattttcggggtagtccgatttgctcaggtcagtatggaacttgcaagaatcgaagccaactttaccggtttgtcacccggaacccacagctggtgtatcaacgagtatggagatctcacaaac

SEQ ID NO: 18 - DNA, 595 bp, Arabidopsis thaliana
gcggccgcgaaatttgtcgtccgccatgaagattcgagcttcgatgtcgactacaacactgaagatggtcttgaggttttacgatttctaatcttctccctcactttagttcctcctgaagaacaaaagatcgttgcggaagatgataatcgattggtgtctgatgagtctgatctcgcttctttatctgagagacttcgattagtttcagttggagaagattctgtagagaactcagatgcggaaatgttgaaatcagatgaagaattggctcgaatgttgcaggcagaagaagatgctattatgtttcaacagtttgtcgctgcacgagataacggcgaattcgaagggagaattaggccttatgttagtcaagttctcatgtatgaagatccagtccgccaagatgctgctcgaaagactgttcctaaagacgagcttgaggagaaagcattggtttctctggccaaggaagggaattttgagccatcgaaagaggaaagagactacgctttcctgcttcagcttcttttctggttcaaaaaatccttcagatgggtcaatgaacctccttgtgacttttgtggtaacaaaa

SEQ ID NO: 19 - DNA, 594 bp, Arabidopsis thaliana
aacatggaaaggtcttaaagcaaaattgtttatttatacaaggaacaaattatactcaagtccaatgctttggactgataaatctataaacaattcaacatctttcaatgctaatcaatacccaaaatgcttctactatttagtatttacatataacaaatcttgactctcacatatcagaatccgacccaccagaatcactccaagctctgtccgacatgaaattcggaggcaaaaccgggaatttcaccgcattccgctgcgaagaaggcgatatcggactaccaaccttcctcctctgcatatttctcataatatctaagcaaactttatcaaccatggcaagaaaatctctaacgataacaaacaaatgaagtggattcttcccctttgtaacagctcctgcttgataataatccgttgtacgtttcacaagctccatcactttcctctcttcacctttcgctattttcacctcttcctctaccgaatcaagaaacgtcatcatcgttttcacaaacctccctccttctccatcttcacattctccaatcaccgttttcgcatctttcgctctaaccgcaagagcagaac

SEQ ID NO: 20 - DNA, 594 bp, Arabidopsis thaliana
  misc_feature (1)...(594): n = A,T,C or G
tttttttttttttttttttttttttttcaacgaacgtataagatgtggctatttattagaaacattgagaaaatacagaattttaaccagagataagcatctttatcaccacacctaaaaatagaaatgtctttccaaaagcacttaaaactagagagaacgagtcataaagtaaaaaaaaaaaaannnagctatagagctgtttttcaattcctccaagtttggtgatcccttcttccttcctctggcaacaaaacttttttcatgtgtgcctcaaatgaacaacaaaacctcactgttgttcttccatggactctgaaaattgtgacattttagaggttttgttggttatttaagaggcagatgcagccaccttcttcctcactatcctttttcgccgagcctttggaggtggagaatctgaaactgaatcttcttgcttcttcccgagtagccctgagacaattgcattctttgagatgaaccattttgaagatggctttgctactgcttcctctgagggtcggttgtatgcttttgccagcagatcatctgactgcgccagtgggtctgcctctacacctagccatactt

SEQ ID NO: 21 - DNA, 594 bp, Arabidopsis thaliana
ccacgcgtccgccacaatcactgggctgaacattactggatacgcaatagcgctctgtggtgttgtaatgtacaattacataaaaatcaaggatgtaaaagctattcaaccaaccactgacagcctcccagatcgaatcacgaaggactggaaggagaagaattcgtcagatggggggagccccagagggttggagcttaacgatgaagaagcccctctgataacgtcgcggttgtcgcatattggccggactcagcttggaaaccacacggcggtctgagaatgacccttatgttgtttcacttctcaggtgaaaatgtcttttatctcttttggaacccaaacaatttaaatagaatttacctcggattacttaacattgttagttctacaaaaaaagaaacgcaaaattatttgtagggtctctgaaagttataaatgttttcactagacagcgtagctccggacccggccttggtctactctttatgatccaaacagttctgacttctgagtgtgtggccctgtatttgatattttccttttctatattagctggaaatactataaattttgtttaaaaaaaaaaaaaaa

SEQ ID NO: 22 - DNA, 594 bp, Arabidopsis thaliana
ttttttttttttttttgtaggacaaactatacttaatgaccaaacgagtatattcctgaatacaattacacttagctttattgctttgcagatccatcacacgataatgcaacgaaaaataattttagtagaagtgatttcttatgttacactttacctcgcccatgaattttcaggccagcacaaagctgcatatatgtgcaagagctaaagctcaaaggctggcctgtctcctagtcacttgcccactttgttggtttaagagtgtcaaggccgctgatacgcatgtaagacaatgttgagatgtataaagatagcttcaagcgacgttctcagacccattggcatcgcatgtcaaagacaggacctccatcagttccattcgatattccaaacctctgagataatgtcccaatagcatgcaccagaagagaagacgagcaaggtagtctcgagtcagtgagataagaggctgaaactgcaacgaagtgttctctacaagttcagcacaatcttcatcactttttgctttcaccgtttcagtaggtggaacttctgatgctggaaacttagagtgcatcttcggtgatagag

SEQ ID NO: 23 - DNA, 594 bp, Arabidopsis thaliana
tgctgaaccaggaaccgcttttgatgaaaccgagtcacttggtagggagaaaagcaaacccgagagatgcttgtgggttcccaagacgctgaggatcgatgatccagaggaagctgctaaaagttccatctgggaaacattagggatcaaaaaagacgaaaatgcggatactttcggagctttcagatcatcaaccaaagaaaaaagcagtctttctgaaggaagacttccgggaagaagaccggagttgcaagcgaatcctgctgctctttctaggtcagcaaacttccatgagagctcatagaaagaagaagaatctaagcagctgatttgattgtttttgggttcagtcttgtgttccaagaaagcagacaaattcaaacaagtttaaaggaacgtttatagttatccacatgatgtatgattctcagaatcttgagagtgatctaacttattggacttcagtagtagtggcagcaacaagcttgttttcggcatccgcggaggagcgaaccactgtctttaacttcttagatgaccgcgatgtcaagtgtttaccatggtaaatcaagtttgctttagtagatgtgtagt

SEQ ID NO: 24 - DNA, 594 bp, Arabidopsis thaliana
ttttttttttttttttttaaaaagtagaaatgatattatattgcttaagttgaagtgtttatttgtataacattttcacagccaaccagaaaacaatttctagtcaccggaatcttttactggaaacaacaaccataacatatatatcttacaaacaacttttcatctttgatattaaaccgatgcaacatttccatctttgatattaaaccgatgcaaccggaagatcattcgaaccggtatcaaccctaaacacattcttgcttgaaggcaaaccagctactggttcatcttcaattccacattcattagttcctctccttatcatgaaataaccatcatcaccccagcctctgttccattgatttgccatcaaccaataatcttctccttcactgctggttccccaaccaataagtttaacagcatgacctccaatgttagaacctgttatgtgcttatagactccagatttgtaatgagcaaaatcctcataaacggtaaaagagacttcaacaggtccattcttataaacctctgccatgatatcttgtggattagatttcacagtgtatgtactaacactgtaatgct

SEQ ID NO: 25 - DNA, 594 bp, Arabidopsis thaliana
  misc_feature (1)...(594): n = A,T,C or G
ccccccctttttttttttttttttttttttttttttttaataaaagaaagtcggaccaacatgggtccaacatcttgttatcaatagttgaaaaaggtatacatacataaagatattaggtatttagaggaagcatttcttacaacaacacacaaaagcaaaagataaagaagcattgtaaaggtagattagccttccttttcatcgttagtatacttaaacttgtgatggcttagtctcggcttctgcggcttttggttcaacatcagcttttgcatcaaccttagcctcagtcttagtctcagcctcggttttagtctcagtcacggtttcgaccttaggatcagcctcggcttttggctcagcttcagcctccactggccagtaagaagtcttctttccggtctttgaaactgtttggaaaactgcttcaggctcaacattacctttcactgtcaccttttgctccttgatatcaatgtcaaatgactcaaccccttccattttgcctaannctctattgacggcaccaacgcagccttggcatgacataccaactttgaggacaacggtctgagccatggctagaataag

SEQ ID NO: 26 - DNA, 594 bp, Arabidopsis thaliana
ccacgcgtccgacttccgatcatcgacctttcttcgccgggaaaaatttccactgctaaattgattcgtcaggcatgtcttgaacatggattcttctatgtaaagaatcatggaatctcggaagaattaatggaaggggtttttaaggagagcaaaggcttctttaatctcccattagaggaaaagatggctttactccgccgtgatttgctcggttatactccgttgtatgctgagaaacttgacccgtccttgagctccataggtgattccaaggaaagcttctattttggctctttggaaggtgttctagctcaacgttacccaaatcaatggccttctgaaggtatcttgccatcatggaggcaaaccatggaaacttactacaagaatgtcctgtccgtgggtagaaaattgcttggcttgattgccttagcattggatttagatgaggacttcttcgaaaaagttggagccttgaatgatcctacagcagttgttcgcctcttacgctatccaggtgaagtgatttcgtcagatgttgaaacgtatggtgcctcagctcactcagattatggaatggtcactcttctt

SEQ ID NO: 27 - DNA, 594 bp, Arabidopsis thaliana
gtattttatcaaacattaaaaaagagaggcataataattcatcactatcatcaataatgcaagacataacagctgtactcaacagtagcatctcctgacttttgatcaaaccacatggtccgagcctcgacataacctctagcaaaccggaagagtccacttcctccaatcaccggcatctccctaaccttggtcaacacagcgttccggccaagaatcgcgatcgaacttccgttatacttccctgtcttgaacgcaaagttcatcaccataagcgcagatgcatcacgttgaccagtagcagcgtagatcccttgcgcttgtcccactaaagtcgaattcaccgcgacctccgtagttaatcggttatcgatcacagtgaccgatccgaagaaggaagagttggagataggagggttgatcacgaccgaactagggtttgagccgcttaaaatgtcgtgccagtagacacggaaatgagtgagtttctccttacggaggccaaaatgttttttgtcaatggtttttgcaaagttttcgcctttacgggcggaaacaacggctgcgatgaggaggatttgggtgacgatgatg

SEQ ID NO: 28 - DNA, 594 bp, Arabidopsis thaliana
gaaaagcaaggtgatgctgtcaagagtggagcaaccattaggttgcagcatatgaagaccagaaaatggcttcacagtcacttgcatgcatctcctatatcagggaacttagaggttagctgctttggagatgatacaaattccgatactggggatcactggaagcttataattgaaggaagtgggaagacatggaaacaggaccaaagagtccgtcttcaacacatagacactagtggctacctccatagccatgacaagaagtaccaacgtatagctggtggtcagcaagaggtgtgtggaattcgggagaagaaggcggataacatttggttggcagcagaaggagtctaccttccccttaatgagagcagcaagtaaggttaagagtgaaaaaacttctctggaggactttgaatcttatctcttactctctaaactcacaatcaagaaaatagagatatatatttcttaattttcgattggtaatacttttagtggcacgaatatatcttgttttggtagatattctgcatttatctcttttttaggtcacccttaagagacactatcttattatcctgatagtaaatc

SEQ ID NO: 29 - DNA, 594 bp, Arabidopsis thaliana
gcgccacatttttgtttcgtgggaagacagaaagttgttctgaacatcgacatggacaagacctacgaagacgacctcctcaaggcagtgacaaacgcaaagctcctgcttgagccacatgacctgatgctcatggatttcactagccgtgtagattcgtcctcgtttccaggacactatgtactctattgggaactcgggagcaaagtcaaggacgccaagtttgaacctaaccgcgatgttatggaagaatgctgcttcactgttgaggagtctctcgatgctgtatacagaaaaggacgaaagaatgataagaacattggaccacttgagattaaggttgttaagcctggcgcttttgacgagctcatgaacttctttctgtctagaggctcttctgtgagtcagtacaagacaccgaggtcggtgacgaatgaagaagccttgaagatattggaggccaacgttatttccgagtttcttagccggaaaattccatcgtgggagttacatgagttacactccggcagataaacccgcagtcataatatctgtgagatttgagggcaggggaggagaacaatgtttacgact

SEQ ID NO: 30 - DNA, 594 bp, Arabidopsis thaliana
tgcttacaagatagtcacattttttggtgatatatttatgtacatacgtagctcacaaaaacgtgcaaaattctctatgaatgcagaaaaagaaagctaacaatcaccaaaactatagcaacaaaaaagcaagatgagagcaaagtaatttaatatccataattaattaagttctttagtgagcaacaccaattgaagatctcttgacgaaccttcctttcatgcgaggccttttctctgcattcaatttacgtacctcgtaccttatcttcttggagaacaaccttgtcctccttttctctcggtatcttgaaaccctagcctctcttcctccatccccagcatctcctaggtgtaaccctaggccgcggaagtggttgtgatgatgagcctctgctccactttcacccatggtatgggttgggaaacaaaccatgtcgaggtctatttcagatggcacccgggcggtccatgggatcccttggcctccccaagtggaaatgactgattcatagtccaatctaagcataagagccttctccttcttctcttctttaatcccaccactcatctcattcactcccatctccatca

SEQ ID NO: 31 - DNA, 594 bp, Arabidopsis thaliana
tcgagcggccgcccgggcaggtgcacacactgattgcatagtgactgaagatagtgaagtagcagaaatattcctccgccaagtggacagtgctgctgttttccacaatgcaagcacaagattctctgatggttttaggttcggacttggtgcagaggtgggggtaagcacgggcaggatccatgctcgtggtccagtcggggtcgaaggattacttacaacgagatggataatgagaggaaaaggacaagttgtcgacggagacaatggaattgtttacacccatcaggacattcccatccaagcttaaacaagacttccgagtgtgtgtttgtgtatttggttgagacttgaggagagacacagaggaggatgggcttttttgtttcctctctgcttagtactcatatcctatcattattattattactactacttattattgaaaccctcgcttatgtagtggttttgatttagggttaggattgcaccaaaaataagatccactttaccacttagtcttgctcataagtacgatgaagaacatttaattagcttctcttcttgtcattgtaagctacctacacatttctg

SEQ ID NO: 32 - DNA, 593 bp, Arabidopsis thaliana
gtttgtggattggacctgttcatagagtcgaggccatctcgttcttggttgcttattattggaaagaagaatccaggttgttgaggatcaggtaaaacatacgaattgtttatgagcatcatgttgattgtcgacaagctggggcgatctgtgggattgtgttgaacacacagcaacgcaatgtggatgcatcttgtcacttcttcggtttcacaattctccgaaatggttggatccacgagttctaatggtgaatcgtttctccacaacctccaagcgtatgtgaccaaattctcaactgtagtgtctgactggtggatgaatctgttatttcgaccacatataatctcaagaactaagactccgaaactataaacatctgatcttgttgagaactgaccttgcctcacatattctggaggcatgtaaccgcgtgtcccagctattttttttgtattagctccactttgatcgatcccaaaaattctcgccattccaaaatcagcaatttttgggttcatatctgcatctaggagaatgttgctggctttgaggtcacgatgtatgatcgtgagccgtgagtcttgatgaag

SEQ ID NO: 33 - DNA, 593 bp, Arabidopsis thaliana
ctttttttttttttttgaaaagttaaaatcttgattccataagaaattgaaagcatatgaacattcaattcaattcaaaaaacacagaagatagattctttcttcaccatagatctaatctaaattactcttaaaaagccttaaaaactcaaaaaacacaagagagtggatttggttgattaatcaatcgtcttcagcagatggcttggaagcaccggtcttcttaggaagaagaagattgtgaatgttaggcatcacacctccattagcaatagtcacatctccaagcaatttgctcaattcttcatcgttcctcaccgccaattgaatatgccttggaacaatcctcgtcttcttgttatccctcgctgcgtttccagccaattccaatacctcagcggcgaggtattcgagaacggcggctaagtaaaccggagctccggcaccaacacgttcggcgtatttgcctttcttcaagaaacgagcgatacgacccacagggaattggagaccggctttgctgcttcttgttgttgccttcttcgcagacccagatccgagtgttttaccacgacccgccattgaaatcgatt

SEQ ID NO: 34 - DNA, 593 bp, Arabidopsis thaliana
cgaccaaattttcgtcaagattcaacgacttccacaacaatgttttgcttgcagctaaagaaacaaagacccaacgacatcattgactaagtagaatcatataatatagtacgatttttcacgacagaaagaaaagtcgacacattttaaactctaccaacgacccgacccaaaaccaaaagtctaaaattagaaaaagtcaaaaggagaaccacaaaggcaggtagatagataaaaagcagcttccttttgatattcgtcatcatcatcatccactttacttacaatccacctgcaccttcttcatggtctctgatgcttcctggaatctccttcgactttggctggttttgaagggttgttatggtggaccttagcagatcatctcctacaatcacccgcagtttcctgacaaactccgctctcgtcatcttcttatccctcagttgttggtagtcagcattgatcaacaacatgtcgttctctgcaaccttatgtgagattgctgcaaacagagtaggaaatggcatccatggagatttgggtcttgtagtgcttgaaccaacactgtttgcacttcctgaacctcttgc

SEQ ID NO: 35 - DNA, 593 bp, Arabidopsis thaliana
  misc_feature (1)...(593): n = A,T,C or G
cctcgagcggccgcccgggcaggtccgaagtttctgatcatagacgatggttggcaacaaatagaaaacaaagagaaagatgaaaactgcgnnnnnnnaggagcacagtttgctactaggcttgttggtatcaaggagaatgcaaaatttcagaagagtgatcagaaggatacgcaagtgtcaggactaaagagtgtagttgacaatgcgaagcagcgccataatgtgaagcaagtttatgcatggcatgctttagctggatactggggtggagtaaaacccgctgcttctggaatggaacactatgatagtgcattagcatacccagttcagtctccaggtgtcttagggaaccaaccagatatagtaatggacagccttgctgttcatggtctcggacttgtcaatccgaagaaagttttcaacttctacaacgaactgcattcatacttggcttcatgtggtatagatggagtcaaagttgacgtccagaacatcattgaaaccctaggtgctggtcttggcgggagagtctctctcactcgtagctaccagcaagctttagaagcttcaattgcccggaacttcacaga

SEQ ID NO: 36 - DNA, 593 bp, Arabidopsis thaliana
tctttggacaactggttgatttggagtattttcaataacattcacacaaagttttaacagaaacacacactgatgcaacagaggaatctcgcacacaatgccaaggtgacaagacaagacacaggaatttacatagtagagaaacgagaggaacttgtaagttgtcacagtatgaatctgagtcggagatgaagtatgtgcctgtgcgctactctgagtgcgatgtccaatacattagcccacttatcaatacaaatacacattgaaagacaccagccacaccagtccaagttgaaggcccagtcttcacaaccgaatcttgaatcagcaagccaacagaagcagctaaggaaacaaatgctacgacatacgctatgaaaagccacagcttcaatctccactcgccttcgtcgtaaggagagtaatcaatgtcttcttttctgacgcaattgaacatcaaagctccgagagaagcgaatatgccgggaaggtaatggacgaagggaacttggatggaactgcaaacgacggcgtcgacccaaaaccaccacccggttccgaaaacggcgccggagaatccgggtccgaaaatc

SEQ ID NO: 37 - DNA, 593 bp, Arabidopsis thaliana
  misc_feature (1)...(593): n = A,T,C or G
cattttttgacagatatggcgatctggtttgctagatccaaaacccttgtttctagcttgagacataatctnnntttgtcgacaattctcataaaacgtgattactctcatcgtcccatcttctatacaacttctcagttatcttcaacggcgtatttgagtcccttcggtagcctccgtcatgagtctacggccgtggagacacaggctgatcatttggttcagcagattgatgaagtcgatgcccaggaactggatttcccaggaggcaaagtcggttacacatcggagatgaaattcataccggaatcatcttcaaggaggattccatgttaccgggttcttgacgaagacggacgaatcatccccgatagcgattttattccggtgagtgagaaactcgctgttagaatgtacgaacaaatggcgacgctacaagtaatggatcacatcttctacgaagctcaacgtcaaggaagaatctctttttatcttacttccgtcggagaagaagccattaacatcgcttctgcagctgctctcagtcctgacgacgtcgttttacctcagtacctgcccgggcggccgctcga

SEQ ID NO: 38 - DNA, 593 bp, Arabidopsis thaliana
ttttttttttttttttttagcttaaaaccaaactttgatgaaaagatttgattgatacaaaaatcaaagacaaacaacaaagccgaatattaaaatagtgaagaaataaatactccatatgacttaaacttaaaaatggtcaagaagagagagatatgttcgtagctgggagagagaggagagaacaacaactaagaaaatttaagaaatgtaaatcgctgatagacgacgggtcaaaatcagatcaaagagtgccttgcaaaacaagaaaacctttcttctccggtgatactagtacggcagagcaaacacagcaacagaaccgacttcttttctcccttcacagcagatcggccacgttcgaaggcagctcttcgacaaccacattgtagaatttctgaatatcaaacagcatcctctcatcatcacgggtcacgaaattgatcgcaacaccctttctcccgaaccttccacttcttccgatacggtgaaggtagttctctggctgagttgggagatcgaagttgataaccagggagacttgttggacatcaataccacgagctaagaggtcagtggtgatgagaacacgg

SEQ ID NO: 39 - DNA, 593 bp, Arabidopsis thaliana
  misc_feature (1)...(593): n = A,T,C or G
ttttttttaaacattaataacgagttaacgacattaaaacccaaaataacacaaatatttttcaagcccaaactctatccacaaacccataaaacaagaaaatggatcaagtccacaagcctagaagagagaaacgataagaaatttaagaacccatatagagccaaccgctaaaagataaactgagtagcaagtagtaacacaactctaaaactctgaaaaagcctttttgtactttgagacatttctctactcagcagcagagttaccctgaagaagaccatccctgatctgtgaagcaatgtccctaacagcgcctggaccgtgcggtatgaacaccgagtttgacttcgaagnngcacnaatttnnttcaatgtgtcaaagtactgagtcacaagaaccatatccatcacgtctttggaagatgttcctggaacagactcggagaaggcgaggacgctgtttctcagaccgtccacaatggcttgtctctgacgggctatacccatacctgaaaggtatttcgattcagcttctccctcagcacgcttgatctgcagaatcttctctgcctcagctttctcactcgctg

SEQ ID NO: 40 - DNA, 592 bp, Arabidopsis thaliana
ttttttttttttatttgaacatatttttagtggtttaatatcattcagaatttggtctttgaattgactattctcggtccgcttaaaccgtattgggtacatctcacttttacaattgtagcagaaagttacattatctattataattgaaaaaatgaaatgacatcttttatatctggttttgtattgaggactcaaaacagaggaggaatactctgttcgttcctgaagaaatttgttggatcaatcttccctttaaccaaacctaatctcttgaaattacctttgaaataagtctcaccccatttccttgcatcttcgaaactcgtgttaatccctttggtcgagcccaaatcaagatctctgtaattcaaataagctcctctcggcgatttagaaacatacggagtcatgtaatcgtgtaacgatctcatccacctgacatgtttgttcatctcctcgacttcattcactttccatttcaccatgtactgtatattatacagattacctcttctgtgtggatatggagattctgtttctgaaatcttgctgattttcccacccaatggctcaaagatcatcagtggag

SEQ ID NO: 41 - DNA, 592 bp, Arabidopsis thaliana
ttttttttttttttttatttaatggtcattactgacaagatatattatttggaaccgtcaaagatgttattttgtaccaactattcaactgcagagatatacaagaccactgaaattcttttcactgctttttcaaagacaaacaaaagacatcgaatccactcatcccaaattccatagagtttaaaacaaaaccaagaaacaagagaatacttacaaaagagatctagaataccccaaaccccaaaaacaacacaattaagcacactcaagaacacaaaccaagggcaaaggaacgctttcttttctttctaagtctccttagggaggtctccttctgcaacatgaaagcctcaagcatcaggaataaaatagcatcttagtggatcttcctaatatccaatcattctaaacgtcaaagcttgatccgagcagagtattactgattgtatataatattcctaagtaaattgaaactgacatgcattcaaagtcaaccttgctgctactgcttatccgaagcatcatggtactcatccttatctccctcttcttcagccacctcaggcactgtatgaagtttatcactgtc

SEQ ID NO: 42 - DNA, 592 bp, Arabidopsis thaliana
cggccgccctaagtttacaactagtaagtttccttctctcccttacattgccagctcttttgttactaccaaacaacataatatctaaacagacagaaggtaaagagtctatacatctctaaaacccggtaaatagctcgcctaggattgttacataattgaaggcctaggataattcacagcttgtggagatttgttgatgatgttgtcaatgctgatttgaggattctgctgctcttttgatgcttccttctggatatgaagttcttccattgtcttgacgatttcgttcatggtcggtctactcttggcatctatagatatgcaatcgagtgcaagaactgcaattttcaaagctcgggttagtgagtattgaccttggagacgaggatccatcactcgcagaagtcttctcttgtttgttaagtagggtcttgcccaatccacgagattgtgttctcctactggttgattcttgtcaattgctcgtcttcctgataacaactccagtaacacaaccccaaaactgtatacatcgctcttcaccgataaatgacctgtagctagatattctggagcagcgtatccctga

SEQ ID NO: 43 - DNA, 592 bp, Arabidopsis thaliana
  misc_feature (1)...(592): n = A,T,C or G
cttatgtttgagaatcatcatgggacaaggcttccgcaatcgaaatgggactttttcagcagcatcctagannggtaagacgacaggaacctgtctctgaacatgttcatccacttccctctgctctgctgtatgaatcctactgtatatgccgttgttataagatcaatgcttctccatttcctttctcctgcatacttcttcaaaccttcttcaatcctcttataaccctcttcttcattttcttctgtttcacctttcagactctttgcctttatcgcttcacctagacaacgagcaaggataactccatcctccatggctgagcaacctccttgtccgatatcaggagtcattgggtgaagtgcatctcctgcaacgcacacgttgtcttttgtgatgtttgaccatagcagttcccatggaggtcggtacttcagttgagacatcaccatgctatcaagatcagtggtctccaccacattcttaatgttttcaggcaagtctttgatcttgttcagcacaaactctttgaggatttccgaatttgtctcctcatctatatcagtggaggtgtgggttaggaaccagt

SEQ ID NO: 44 - DNA, 592 bp, Arabidopsis thaliana
ttcttccaaattttctcatttctcatgggcatatctcaagtacactattgcaatggtgaccagaacttagaagcaaaccttctagatcatgaggaaactgaatcattttcagtacctcaaacgaagaactgtaagaggtggctccgtgtctccatatacgcaatctttgtcatcttctgccaaccacttgctacagttctgggtagactgtactatgaaaatggagggaaaagcacatatgtggtaacacttcttcaactcattggcttccctgtactgattctcttccgcttcttttctcgaatcaggcaacccaaatcaacagatacaaatttcagtcagtccccttccttcaccacccttgcatcggtttacttgtgcactggactgctagtgtctgcttatgcttatttgtctgcagttgggttgctttacttaccagtctctactttctccctcatcttggcctcacagttggccttcactgcctttttctcatatttccttaactcgcaaaagttcactcctttgatagtcaattctttgtttctccttacggtttcctctgccctcctcgtggtcaacactgatt

SEQ ID NO: 45 - DNA, 592 bp, Arabidopsis thaliana
ccacgcgtccgggaagtctccgaagagggtcgtatagcgtttcaggctctctttgcaagagaaagattgcctcaaagcttttcgcctcctcaagtggcagagaatgtgaatagaaaacaaagtgacacgtcaatgccattggctcctaatttcaaaagccaggattcttgtgctgcagaccaagaaggagtagtaatgatcggtgttggaacatgcaagagtcttaaaacgagacagacaggatttaagccatacaagagatgttcaatggaagtgaaagagagccaagttgggaacataaacaatcaaagtgatgaaaaagtctgcaaaaggcttcgattggaaggagaagcttctacatgacagacttggaggtaaaaaaaaaacatccacatttttatcaatatctttaaatctagtgttagtagtttgcttctccaatctttatgaaagagacttttaattttccttccgaacatttctttggtcatgtcaggttctgtaccatattaccccatgtcttgtctcttgtctctgtttgtgtatgctacttgtggtctatatgtcatctgctactactgttaattaacca

SEQ ID NO: 46 - DNA, 592 bp, Arabidopsis thaliana
ttttcatttaactgaaatttattaatgaaacagtaccaatcagtttcacacaaatttgtagaaggcaacaaacgtataaatgtcaaaacaatgcatgagtgacacacgtaactactaatgttattaactgggtccaattaaagaacaagagacactttaattagccttaacaactgtgacaggacatgttgcatttgtcaccacatgattgctcacactacccagcaagatccttttgagagaacccaaacctcgactgccaagaacaatggaatcgagttttagattttcgacagcatcacaaagtttctcccttggatctccccaatacacctttgctacaaccttcacctttttagccctagagagagtatcaagaacatcaagaacctcaggatcgtaagcaagtccatactgtttagacaaattaacctctctaaattcctccaaaggaattagcggtgaaccggtttcctcgaagaggattttgcgggtatgatcggcgttttgtggttggacgtgaatcaagatgacggtgtcgccgtcttcaaggagattctccgccgcccaccggagagctaatttgctcgtc

SEQ ID NO: 47 - DNA, 592 bp, Arabidopsis thaliana
tttttttttttttttttttttagctgaaacaatatgttattatttctcatacagtgttctttgacaaatatgaaggagatattagaaacaattgacaaactgagaggatacaaaaaatgtaaatcagaaatccgggaagtaatagaggcgcactttggccattgttacaacagagatgatacaataattaatttaatgaggtgataaaaataagaaagtaaagaaatttcagaaagaagcctgaaaaaactgagccttttagggttattagaatcgaaaaaagcttacccggagtttgcttttgtttccgtttgctttcttgaataataaataaacgaatcatcagtttcacagcttcacagaaatgtgaacctctctctcgcagctgaggctcagcgatctaggtgcagctgttcaagccacgcatcaagaatgtcgctctcacgagtgtcactgttgtgaggattcacactcgaaccaccttgagtcaatggccttgcaccattcatgttcacaacacggtttccgttcctaggtgatgaagagtcttttaacatctgctgagcccatgaaacatctgccggacgcgtgg

SEQ ID NO: 48 - DNA, 592 bp, Arabidopsis thaliana
  misc_feature (1)...(592): n = A,T,C or G
aacagctccacttgttggcctattcgctaaactctatggaggaagtttaggatcttatggaggaggatcatataaaccttatgaaactacaaaaccagcagcttcatcttacaaagcaacaccaacaacatacagtccaaagcaatcaggtgcacaaatcgagtttcttcattccataactagcaactggatagccgggaacacaagatactataggcacaaagtgatcatcaaaaacaattctcaaaaaccaatatcagatctcaagcttaagattgaagatctctcaggacctatctggggtttaaacccaacgggacagaagtatacttaccagcttcctcaatggcaaaagactttgagagcaggacaagcttatgattttgtctatgtacaanntnnccctcaagctaaagtctcagttttgagttacaactagtgagaaaacaacactttcttcaatctttttgtttatgcttattatgagtgaaagatgtgaacatagccaaccaagttgagcctaaatatgagaaatgtaaatttgtgacccttggtagagaatgcttttttgtctacctaaaaaaaaaaaaaa

SEQ ID NO: 49 - DNA, 592 bp, Arabidopsis thaliana
cttttttttttttttttggttgttgaaaaagaatgaaaatttgcagacttttttttactgtctatatagagtcagaggagaagatcataagaacataaagtgttttgagaaaagaaatggcaagagttcaaataagatgatataacatgtaaattatgtttttttgcctttgcaaggcctccggacaaagtctcagggagcttcaaatgtctctcccgctttcgtatcgcctttttcctcttctttcccgcgaggtttcaactctttacttcataagaaccggggctttcgatcagcaggcttaagaatttggaaagagcacattaaactttcatcaacactcatcatagcaccagcattgtcaaattcaccacagtagttgggagcagaaaatatcgtaacaagctgtctatcggcgaaaaactcatatccatcctctacaacctggtgggcacggcagatgagatccatatcattctttattagaaactccgcgactttgtcagggccaaacgtgtaagagactccacggtcattcatcccccaacctttgacatctttgcttggatcagaccaaagcagatcacagagc

SEQ ID NO: 50 - DNA, 592 bp, Arabidopsis thaliana
ccgatcttgttttctcatcaaggaatcagtctctctccgtaaaggtccaagcgttagctgctgaaaccgaacagccaaaatggtgggagaggaaagcagggccaaacatgattgacattacctcagctgagcagtttctcaacgcgttaaaagatgcgggagatagattagttatcgtagatttttacggaacttggtgtggttcttgccgtgcaatgttcccaaagctctgcaaaacggcgaaagaacaccctgacatcttgttccttaaagtaaactttgacgagaacaagtctctctgcaaaagcttaaacgtcaaggtgttaccgtatttccacttctaccgcggtgctgatggccaagtcgaatccttctcatgctctcttgccaagttccagaaactgagagaggcgatagagagacacaatgtaggaagtatcagtaacatctcttcttcagcttctgagaaagttgaagattcaagtgaataatcaatgcctggttcagattgatcacagattattttgttaaatcgcttccctgtatatatgttgactgcattttccatgtggtgcatcataatttttgtaca

SEQ ID NO: 51 - DNA, 592 bp, Arabidopsis thaliana
agtataggagctatcgatatactacagagatccatcaacatcaactttgtctttacaagttctcctcttatttaaatccacctaatgtaggtggctatataataatggactaactaaactggtgcggccaaaacaattaactatacagtcaactaataatttaccctgcccttgtactaatctatgttaataagccttaaacctgcaacaaaatgtttagcgttgtacagacactgttctcaccgcattctcctgacaagctatgctttggtgttctgattgtggcatgtcctgattggcagctaggtctttggtttcatctgattctcctattatttactccaaagatttggcatcagtctttgtttgcctgattttccatattgaagcgccactgtcatcatcaagttggccttttgtaatggtcaaaagggctaaactctgtggagtcgcattggcatcttctgctatacaactcagatctttgttcttaacttcatcaattccttgcttcagtatcttctagtgagcaaatgtccttcctgggggcatatcatggtcatgttttccctcgtatgtcgttataagcaac

SEQ ID NO: 52 - DNA, 592 bp, Arabidopsis thaliana
agtaaataagccaatgaagtaacacttcttctgcttcaaattttattcagactaaagcatcttttaataaaaagacagagacacaatctaaaaccaaacctctaattctttttttctttcttataatccgaaatggagaagaacaaaacattaccctttttttttaaataatctcattctcctcctcaatagtttaccaactctcacatgtaaattaattgatacccattttccaggacatgttaaaatcctttccaacaagcatctcaagtcctctaacctcaaccatcacactcttgttctcttcttcatcttccaaaccaatcacataggtatgctccttcgagctaacctcaatcttctttgtcattggacttccattgatttgaatctcagacacttgtcctgctcctctaagtcccaaaacactcactttctcaatcacccatcctttgctcaatgcaaacttaccttctttaacttgtgaccacatcttcattgtcccgtttccgaccgaagcgtagaagtcaacgtacgtggactgtccatttcctagcttcatttccggaagctcgtcttcgtctagatagag

SEQ ID NO: 53 - DNA, 592 bp, Arabidopsis thaliana
cggccgcctaaaaagctttgaacttatttcataaacatcttcacaaatattgaatcatattcttttttcgctgtataataagagttgttatagaaccaaagttgtaaagaaaaaaaaaatctagattctgtaaaatgggaactcacggaaccagataaagaaatttcaccggcggtcttacgtccccggcgggatatatatttcatctcttcctcctttcttccccgtatcgccaacacaagttggatgatttgattccaaaatgtgaggcattggaacaaaaaatttaaaaaagtggagaaaaacctgtgtctatgttcttcttcttcttcagattgattgtcgcttggtgaatggtttttggcagatgagaagtctttgttcactgctgctttcaacctctattactcgagcttcccacttcaactgcgttatcgtctctctcgccttttccaccagctgtgccgtgtcacggattatcacccatccctctggacgaagcaatcggtcaatctctgtgaatatatcaataagtagacatgtttttcggggctgacttgtctgaagcgacaagagattgtctgcatgtacc

SEQ ID NO: 54 - DNA, 592 bp, Arabidopsis thaliana
ctctctgtgtcaattttcctcttctcatgtctcttcgtttcttcgtcttcgttgggcgattcggaggcgacgtgttccggtatagttccgttacggtaccggtacgataagatctcgataaccgactttggaggcgttggagatggtcgaacggtgaatactaaggcgtttagggcggcgatttatcggattcagcatctgaagaggagaggaggcacgcttttgtatatacctccgggagtgtatttgacggagagcttcaatctcactagccatatgactctttacttagctaaaggtgctgtgattagagctgttcaggatacctggaattggccattgattgatcctttgccgtcttatggaagagggagagagttaccagggggacggtatatgagctttattcatggtgatgggcttcgtgatgtagtcatcactggacaaaatgggacaatagacggtcaaggagaagtgtggtggaacatgtggcgtagtagaacgctaaagtacacaagaccgaacttaatcgagttcaaggactctaaggagatcataatctccaatgttattttccaaaattcacctttct

SEQ ID NO: 55 - DNA, 591 bp, Arabidopsis thaliana
tttatttttttttgccacaccaaataataataaaaacaaatacaaaggtagtgaataaaatctctaattcttgaggaaagatctacgccacggtttatacttaaatgcaattactatttgcactaatcatataaatcgagctccttttatatatacttaagataataaattatatgaacatggatggtgtgttccatatgataaattattagagctatgtatatctcttcagccgaaaacaccaacacctaagttactatctcttgctccggcgaggatgtgcccacgtcttttaatagtctctcgtacaactgtctatataaacatgaatcgccataagattttcttagctcaaccacgttcagtgacggctttatctcgaaaacctcagctgttactgataaaccaacttgacctttctggtttctttcttcttgttttactcttaacttggcatgtttcttttgtacactgaatcccatttctgtaacggctgtttcgattttctccagtaaatcttttgctgagctatttgaagtgaatcttattctcctctctgatacattctcttgttcaaagaaaccggacagg

SEQ ID NO: 56 - DNA, 591 bp, Arabidopsis thaliana
tcgcggccgcctcaaacctcagattatataattaggctaaaatctgataaaccaaaaaatgtatcagagtgagtgctaaagagaactttgtgttgacctctctttccctcctaattccttagggttcctcgatttttctttttcaccgaaacaaaaaccttattcctccttctctttctctgtctatctttctctgtacgttttattcactttcctccacgtggatttgcataaaagcatgaaaatttgttgatgggtttctcttcgacatccagattctagcttccaattccgtaattctccgttaaaaaaccctaatttctcgaatttactctgatctgtgtagaaattagggagtgaagtgtccgcaagtgtttggcaatgtcggatgacatggttttgcatttctcctcgaattcttctaatcagtcggatcactctttacccgacaaaatcgccaagcttgaggcccgcttgactggtaagaccccttcctcggccaagccaccacaacaacaacaacagcagcagcagcaggtctctctctggtcatctgcttctgccgctgtcaaagtcgtcacttccacaccg

SEQ ID NO: 57 - DNA, 591 bp, Arabidopsis thaliana
  misc_feature (1)...(591): n = A,T,C or G
cttcctttactccgtcaaaaccatgtttctaagtcagttccggagctgtaaacctttgctcgagtctcgtctacctttgctccgcctctctctctctaaatgtctcgatcagtccttcaaaaccacggctagtagcgaatacggtagtaagatcaacaaagtcacaaagcatgtcaatgaggaggatggtgcaactttctatgttactcgaaggggggcaatcgatagttctgcccctgctgaatcaaaagcatatccaaaagcagctaatatcagttcaatccatagtatgagggaatctcttctggaggaaacagaggaagactactacagacgcttggcactttttgccctgaggaatcatggtggagaggatgccataaatgttattatagaatctctaggtgttgagagttctatgattcgcattgaggctgcatttgtgttgggacaattggaatccaaaacagctatagcttctctaagcaagatcttgagagatgtnnnngngcaccccatggttcgagtagaggctgcaaaagcccttggtttcattgcagatgagaagagcagagaagtactccaagaact

SEQ ID NO: 58 - DNA, 591 bp, Arabidopsis thaliana
  misc_feature (1)...(591): n = A,T,C or G
tttccgtgaggattgaggatggagaaagtcagtttgcattcacggccatttgtgatttcatcaacaacttcttcatgtgtgatgattgccgtcggcattttcacgacatgtgcttaagcgtcaaaactccatttaaaaaggcacgtgatattgcgctgtggctgtggagcacacacaataaggtcaatgagagactcaagaaggacgaagattctctgggaacaggagaccccaagttcccaaagatgatatggccaccaaagcagctttgcccgtcgtgttatctttcgagcaccgagaaaaacattgactgggatcatgatcaagtctacaagttcttgaagaagtactatggacagaaactggtgtctgtttacaagaaaaatggtgagagtgtgagcaaggaggaggttattgcagctgcagaagagatggcagtaccgaccaatgctctggttgtgccagtgggagctgcattggccatagcacttgcaagctgcgcatttggggcactagcctgctactggaggacnnagcagaagaaccggaaacaacagatacaaagacgttgaggttgagatgccaaagtcg

SEQ ID NO: 59 - DNA, 591 bp, Arabidopsis thaliana
ttatattattaaacagctaaaaggcccactagctacacatgtgagtggcagagaaaagttatagatttcttctattcttcctacactttcgtagagtgagacacaaaagatcaatcaaactactaatgttgcaactacaaggataatgagtgctgatctagtcattaatccaaccgccagatcgactcatataagggtagttcgggttcgggccaggggcaaaaccccttggactcatttcgaagtcactaggtggtggcggtggcagtggaaagtcatgaggatttaagagattatgtccgctaggttgcaatggaggctgaggtgggaaagagctcatcctctggtaattcatttgatcgaaatgaggcgcataacgttgttgcaatgggaatgcattgtccatcagatttggaggaggaggaggagctaacatggggtccaagtgcccaccgtactgctgtggatattctctttgaccaatccctctatcaaggtctgaatatcctcggaaatcaaacatctcgttaggaccatttctcaatggaaactgatccggtaggaaaggaggatccggcattctatagcctc

SEQ ID NO: 60 - DNA, 591 bp, Arabidopsis thaliana
  misc_feature (1)...(591): n = A,T,C or G
ccacgcgtccgacgacgatgctagatcgggctctttcctctcgccgtcctcactccgacgccgatctctctgcttccggcgaatccggaaccgacgaatctaaaaccaaacgcccacacatctacctccttgcttccaatttcctttctcggatcggtcatcagtggtggccttgtctcattctcgctctcctcttcctcgtccttctcttcctcatctccgttgctttccattctcacagctttgtttgcatctcccgcttcgatcccgctgctcggatcgggtttttcggtcttgatggcctcgaatcggattttggtgccctaggtgttccttggtgcagatcgaaacatggaaaagaagttgagtggacatccaaagatttactcaagggtctagaagagtttgtgccgatatatgaaacacgaccgataaagaacaatatgtatggaatgggttttgatcatagctttgggttatggttcatggcnngttggctaaagccagatatgatgattgagagtggtgcttttaagggacattctacttgggttctgcggcaggcgatgccagatacacctatgatttcac

SEQ ID NO: 61 - DNA, 591 bp, Arabidopsis thaliana
tttttttttttttttttttatgcaattaccatttatcattaacaaaacaaaacaaaaaagttcataggtcgatcaaactatacacagatttattcagatttctttcttacaatgccagcgtggagtaatcataaaatctctgggctcactcgtatgaacccaagagcctcaaaaaatagtcttcgagtttcatcggtaagccccaaagaggaagaagagtcttcacgatgaggaacagttcttagaacccttccatccatctgagaagtaccgagacaatccttttgcaattggctgtgccacgtccctctctcttcgatgcagaacccgcaaaaactcatccacactcaaattcccatcttgattcgagtcaaacacatgaaacgcaatttctatcacattgtctgacaatgttattccacatacctgagaggcggctcgtttgaaatctttcattgtaagtaaaccattagctttgccataagcaaaaagcgctagagagaatggtccaagtttactacgtagctcatcaaactgtttgaattccttcagtgagatacgcatgtcccggagatgcgggtgttcgctcag

SEQ ID NO: 62 - DNA, 591 bp, Arabidopsis thaliana
gcacactgaagctcgcaattctggctatcgaaaaccacaatcacaagctcaacttcggggccttcaaggccaatcacaagaaagtcatgggaccaatgataagaacagaggaagaagaagactatacaagtccaccgtggctaatgccaatgctacgagggagttacttcgtcccctgttccatccatgtcgattcaaacaaaaacgaatgcaatttgttctgtcttgattgtgctggaaatgccttttgctcttactgtttagtcaaacataaagaccatcgtgttgttcagataaggagatcttcgtaccataacgtggtgagagtgaatgagatacagaagttcatagacatcgcttgtgttcagacatatattatcaacagcgcaaagatcgtgttcctcaatgaaagacctcagcctagaatcggtaaaggtgttacaaacacttgtgaaatctgttgcagaagtctccttgattctttcaggttctgctctctcggctgcaagcttgggggaatgaggagaggagatttatctctaaccttctctttgagagggaagcatggaagagagtacctcggccgcgacc

SEQ ID NO: 63 - DNA, 591 bp, Arabidopsis thaliana
ttttttggtccaatgaagaaagcatatattaaaaaaattcttcttcgccgattgagaaatttaagttatcgagtctttctttttctttcgcctgtacccttttttggaatagaaaatcatcatcgatcactgtttaatgaagacaacatacacaaaaacttactcattccggattgtctgaaacttctcccacaatggtacagacctcttcatgtcacccattaagcccttaaacttgtggctatagtccaccccattgatacgatccagtgacgatatagcacgaagagcgcttctgatcatgtcttcattacggtcatgctcttgcttcactgcatcttgctttggcttgaagcttattgttttatgcagtggttccacaagagaatccagtactgcaagtacggctgatgggcatttatctgctagtaaggagagtataagatgacaaagcatcttcaggtcataatgatcttctagtccggatttgaggaaaggaacaatgaaagaagacggattaacttgatcaaggcagctgtccaccagagtaaacacacactcaaaagctgctttcctcagccggacgcgtgg

SEQ ID NO: 64 - DNA, 590 bp, Arabidopsis thaliana
  misc_feature (1)...(590): n = A,T,C or G
ataaatggccagtaaagaacaggctcaacaatttcattccataaacagagcagaggatctgcaacgactaagttctgaggattcatcaatgtcatccacacatacacacatcaactaacattatgacgtttaaggatcttctgtatcctccatcttgagatcttctagtttctacaatgctgcaacacataggaaaatgccctaatcgagatcaaggaactccattcttttccgcattgtgccctttaaaagcatttcttccttctctgctttctgagccctttttatctctgcttctggaacctgaaccatatgagctggaagctcttctttttccacgtccaattcaccaatcaagacaacattttctccacggataatgtatagacctaagggaatatcacagtagagatcacccacaatgactctttcataagcttcttctaaaacagcattagcaaattgatcaaaggaccgaagtagacccatcagtttcctaccatcacgaagcaacacaagaannnncnnntctaggtaagcagcaagagaagtggagaagaagatatcatcaggagcagcccaagacattg

SEQ ID NO: 65 - DNA, 590 bp, Arabidopsis thaliana
agatattacaccatattgtctctatgttcatctcatccccaacaacaacaagtgtccacgtcaaaatgataatagtagtaaataacaaatatgaacgagaagaagtaattaaaataaaacagtaatagaaagcagaggatccaaatccaccaaactcaaaagctctctaagccaaaacgacagcgtataaagctccggcaacagctgttcccacaaggaaagctttgttagcccatgcggcacttggtgcatcagcagcaccgtctggtcctggagctggagacgaagttggagttaatccagcggaaggaccgggagcaggagcatcggtctgaggaggagaagcaaccggggatgttgttggagaagtggtaggagctggagttggctcgttaactggaacaggcggtgaagcaattggtgaaggtgtttctgctgtcactggaggaagcgccgttggtggaggagtaacggtggttggtgctggtgcaggagcttgagcgagacatgaagtggccaagaaaccaagaaagatcaaagcttgcattgccttagaattcatttttagattatctcttctttgtctgaat

SEQ ID NO: 66 - DNA, 590 bp, Arabidopsis thaliana
  misc_feature (1)...(590): n = A,T,C or G
taaagcattcttaaaagtcttttccaacaactgccaatatcacaaagaaaataaacaatcacaatgcgagaaaatgtgatgaacatctcttagaaagaaccatttgataaccaaaaggaatccaaaacataacaaaaggttgagactaaggtcaacactgcagatttctcctcatcctctttaagtacgaacacctcggttaagactcaccatacggcttgagccatccatctgcatacctctgtttcctgaaccaactcttcctgcataccctcctcctcggttctgccctgaccactgaccattttgtccagatgatcttcctccaccataacctgatctgttgccttgtcttccttgnnngtaattcgccttgtcttgccaatatccaccaccacctgatgctgctcctgcatagtcctgattgnnntcccttctccttgaactcagatccagaccacctccaccggttctagattccattgccctctcattgctttctgccaaaatcgagagtttctccgttaactggaaagccaatgattgtaatctgctgtgttgcacttcatggaagacgatgcatcgtgttg

SEQ ID NO: 67 - DNA, 590 bp, Arabidopsis thaliana
  misc_feature (1)...(590): n = A,T,C or G
ttttttttttttttttttttaattgtaactcaagaactctttaataacttcaaacttaaagtttacatttgacctaaacaataaaacaacaaccctaattagtaattaccctctttttctctttacactgagttttctaattaccccctcaaagattctacaaaaggttttaaaaccacttaaaaaaaaaaaacagcttttttaaacctctaaactacacccaaactccggtttgcaacttaaatctgcatcaaccggtccttacacgagctcggatacacaactacagaatctacacatagcccgcctttagtatgcgtgcaatcaatctgagtcatcgagaacttaatcttcgtcgatgaacttttcgatttaccgaccacaaagtctccagcatggtaatgactccagtttcctgcttcggttaacatgcattgagatgaagaatgttgaccatcttcagtcgagagttgaaaccgcncannnntaatgttccagccatgaacctgttcgnngtcacaaccttccaaccaaaccnnttgcctggtttgcctagctgaagcctgaagtaaacactgtaggttccagcg

SEQ ID NO: 68 - DNA, 590 bp, Arabidopsis thaliana
ctttttttttttttttagggaataatcttatgaattgtgcatagtcgtcaatggacgacgagaacaataaaagaggatagatagttagtcgtgctcagaatctttaacccttcggaatttaaagatttttgacgattacattcacctaagtaaaattattcaaataatattataaacgacgaaaaaacgatttcttcgtcacatattttttttattcccgatgatttcagacttttttgtcctctctcattcaaccttgaaaagattacggccacacgtgcatggaacaccacacgctcgtttttactaccctctcgcgtcatattccattttctcaagaaaaaccccaatattttgagtaatgcattttccgacccaatatgacttcagtaatatttccacatacccccttcagcttttctatgcttttaattctgcccccacattttacgaattccactgatcggagcaataccattgctcattgtccgcaaacaacttgcaagcttcctctccactaaacagatcttcatgctcttccattttcacgaattggctaaaacaacccatcgtcgacatttctacagtcg

SEQ ID NO: 69 - DNA, 590 bp, Arabidopsis thaliana
  misc_feature (1)...(590): n = A,T,C or G
ccacgcgtccgcagcagtcgattcaagatttgtatgaggagcttgatgaagagcggaatgctgcttcgacagctgcaagtgaggcaatgtctatgatattgaggttgcagagggataaagctgaactccaaatggaattgagacagtttaagcggtttgctgaggagaaaatggagcatgatcaacaagagcttttggatctggaagatttgatatataagagggagcagactattcaggctttgacatttgaagctcaggcttataagcatagaatgatgagttttgggttcactgaggctgaggttgaaacggagaagaacatgcttagccgtaatccgagcatgatcgaaaatgattaccaatatgatctccccacatctgattaccctcctataaagtgcaatgtgaatgagaacccaggtcccctggaggctgatattgatgttgatgatgttgaaaagtacccattggctgattcacctcacccattgaagactttggaacgaannataagtcagatggagagaaatcctagctttactcagcctactggtgatgtatctggagggagacattatacagagaag

SEQ ID NO: 70 - DNA, 590 bp, Arabidopsis thaliana
  misc_feature (1)...(590): n = A,T,C or G
ttttatttatttatacctatattagaattgatgataattaaaggatcacaaaacaaactccagtttatgtatcccattctcgttctcaccaaattaaatacatttcgacaagcaaacattgaaatttcaagaagaagagacagtcttgaaggagtcgcgaaggtgggttaatgtatcgtggtcgcggttccactcgggcgcaggggcgtttacgaaatgggcgtagagcttgttcttggagcaagtgactgtgatcaggctgtgctttccaaccccatctatctcgtacagatagtagacctgccctgtctcgtccttcctctcctccgacaccactttgtccgcgccggctatcaaatcctgcagctccacgtccgacaaggcaaggttgttcagaatcacatccctcggcgccagctgtctgaatcccgccaggaatgtcaggtactccttctccgtcttcttcttcgggttatagaattcgctgtctgttccgtttgtccccttctccnnnntcgacaccagcctctccttccacccttccggcacatcgtacacgtactccgccgatgtcttcctgtctgaattcc

SEQ ID NO: 71 - DNA, 590 bp, Arabidopsis thaliana
accattcagatatacacttacttcttgactgctacggagctgactacgccgttgcagaccttcaaaacttggcggtcttccagcgatggacctttcgtgtttaacactcggcccttgaaacctgacccctgtgagcgtccggtcacttatttcatggatggtgccgaggatgtacgggatagtgggacgaaaacttggtatagcataggggataagaactatggtcattgcggaaagattgagcatactcgattaactaaagtgaagaggatattggtgacttcaatgaagacggatcctgagtattggaacaaggcaccgaggagacagtgttgtgaggtgatggaaggaaaagtaggaaaaagaaaagagaaagaaatgttgttaaggattagaaaatgcagatctttggagaagatataaaaaaagcgttttaattagagagatttttgcacatacagatttagattcgatcattagttatttgtttctaaattcctcaattcctagtaccaagagaatgacgattttctctagtaatactggcactcttcgtttttcaacatgtaaacattactttgtataattag

SEQ ID NO: 72 - DNA, 590 bp, Arabidopsis thaliana
ccacgcgtccgcgatcttatcgcaggaggtaagagtaagaagaccaaaaggactgctcctaagtccgatgatgtctacctaaagcttctcgtcaagctttaccggtttttggtgaggagatctaacagcaacttcaatgctgtgattctgaagaggcttttcatgagcaaagtcaacaaagctcctctttcactctctaggcttgtagagttcatgactggcaaggatgacaagattgctgtttggttggaactatcactgatgatttgagagttcatgagattcctgccatgaaggttactgccttgaggtttactgagagggctagggctagaattgagaaagctggtggagagtgcttaacctttgaccagcttgctctcagagctccattgggacagaacacagttcttcttagaggaccaaagaactcgcgtgaagcagtgaagcatttcggacctgctcctggtgtgccacacagtaacactaagccatatgttaggcataagggaaggaagtttgagaaagctagaggaaagcgaaagagtcgtggattcaaggtctaagaagatgttttctggtttcgtttt

SEQ ID NO: 73 - DNA, 590 bp, Arabidopsis thaliana
cttttttttttttttttttttttttttttttttttttttttttttttttttttttttttttttttgatagaaacagactactaactcaattattagtagtaacgagtaggtactaagatattaaccatgaagaaacaaaactagtctcacatgataacacagaactgacttttatacctgaagaagagtataataactcaaatgaccagaatcaagctcaagtttttgagttttgatctatggaaccattattacaaatagcttagtaggtgtagccttttacaaacataccctccttggcttcctcagactcgccttctccagtgtatttcccgagctgagccagcgaattggctttggctctggccaagagaatgtcctgagccgccttcacgttctcttccttgcctccccatgtcttcaagcaagtgttctgcaaggcacgtgcgtaggagaaggacacgtgccatgggttcggtgcctggttcattgcgttcaagttcaaggtcgcctccaactcggactgtccaccagacaagaacatgattccggggacagcaggagggattctgttgcgaaggagcttgaga

SEQ ID NO: 74 - DNA, 590 bp, Arabidopsis thaliana
tttttttttcaagataaagatcaactcttaaactgtaatatcaagcatatgacaaatagtttgctggaaatcaaaacagtatagttaaacaacatgcatcatcctgctaaatagaagaagcattttaaatccacagtttggttttgttctgtttgttttttcacctccaagaggaaccaccaagctttatcacttcttctgaacttgaatctttccttgttccaaatccttcatcccttttctgactacttgcgtctccatacaaatcttttagctttgcgagattgctgttcactgtcaccgccgatttctctttgttgctactatctcttttaggagtcggttcacgctcaatctgcacactcctgctcctacttctgcttctgctcctgcttctccggtcatgtctacttctgtcgtcctcataatcattgcgcctgcttctactatcatagtcacgccttgatctcctatcattaccataatccctttccctttctctgtatctatccctccccctctctctttcgcggtctttctccctctctctttcccgttgtctatctgagtctctgtcagaataatagtct

SEQ ID NO: 75 - DNA, 589 bp, Arabidopsis thaliana
  misc_feature (1)...(589): n = A,T,C or G
tcataagaattggtgtgacagtaacagagattctaaatcttgcagacgagagnnngagagagagagagttttacaacaatatttcttacacgaaacgatgatcctcattcaccgaaccgacaaagtaaggagatgtgaagacagttttcatttatcaacgcctacatcaagtgctttagagcccatcatcacattcgaatcgatttgcttatcaaatttcttctttctcctctcttcaaagtcttggtatccttccatcagctgaaactgatccatggaaataggattgttatgcaaagaaaggttttgcagactcttgcaatgtatcagcaatccatctggaatctggttcacttgattattgtctaaggaaagcgactttaactgaatcagattgcagagtgatgcaggaagctcttcaacaacgttatcattagcctgtacttcttctaaagaagcacagctccctactgattcaggaagggatttcaatctgttatttgagacattcaacagcagtagattgcggagactaccaatagtatcgggcaagtatatgagcatatttcttgagattgatagttgctca

SEQ ID NO: 76 - DNA, 589 bp, Arabidopsis thaliana
  misc_feature (1)...(589): n = A,T,C or G
caagttcaggaatacagtgatgaggaatttaaactagatgtggcttactagaaannaacaataccaacaaatgagaaatggtgccgtcacttgtgagctggacagatgcagttgttggttcctacctccgatgcaaggcaaggaggctgagatccatcctcgtaccagatcaatctgtgtttgacaaggtctttcaggaaattatcaagcttctcgattgtaacacttggcataaccaccacatgagctatatcaccttggcaagcaagctgccaccttctaacaaactcttcatctttaggccgttcaaagaccacagtgctgctaagctcattaagcatggcgctaatcccagcttcacgaagtcggtctttgaggtaatgcgcgtttctcaagcatttctgaacttctttctggaatcctttgtaacctttcctgtttaaggtgtaccagaggaacaaaggagcatgcccgttacgacttcccatgattgttgcatcccttgaagcaaggtactcaacgttactggagaggactttgatatgttccattcttgttatctgaacaccacatggcatcggacgcgtgg

SEQ ID NO: 77 - DNA, 589 bp, Arabidopsis thaliana
gttagtggctgcatcaggcaagaggtcgatggcttcgaattcgggttcattcacgacactaaaagaaaccgtatccgtggagaaagagataaagaagagcaagttcatcgcaatcgctggaccaatctcctccgagcaatcagctcaaatgttcctctctcaggtccgtgatcctcgcgcttctcacaattgctgggcttataagatcggtgatcatcaccatcgatgtagcgatgatggtgagccatctggcacagcagggaagccgattcagtctgctattctctcttctggattagacagagttatggttgttgtcattaggtattttgggggaatcaaacttggaactggaggtcttgttagagcatatggtggtgttacatctgattgcttgaaaactgctccttcttgtctggtcaagtccaaagtaaatgtctttttctttattgtctcttttgttgttcaacttcattactcctgtttgtttcttctcccaggttcaaatgggagttgaggtcacatttgatcttttaggtgttctttacaatcagctgcaatcgtgtcacgctgaagacatcaaggaaga

SEQ ID NO: 78 - DNA, 589 bp, Arabidopsis thaliana
ggccgccggggcaggtacccatatagtcaaagagcttcataccaccatgtgcgcggccaaatgcatctcctccttctagaaccacgtctttcaattgtgcccaagtattgaggaagacgctatcgaaattgacaatgacttgagaagcaagggatccaatatcttgaatgttatccttcaagaaaaacctgcaaattggctcggctctgtagaccctctcaccctttccttctgagaccttaccacacttgaccacagaatagctagcgagtagacgaagcatacggtccaataaaaccggagcctcagggttacgaggtgtagttggtagcttactcgctatttctgatggtgaaaggaacgagtcgctgcgagaggcttcagcatagagagtgtcaaagacaccgagctcgagggcggctttgagaaccatcggaaaggcagcagcattggctagtctcacggccatcaaacccaactcgttatcatcatcgataacaattggggttttagagttagagcttaaagtttcttctataaggtatcccatttttatttctttttgtttccttcttctccttcaaggcac

SEQ ID NO: 79 - DNA, 589 bp, Arabidopsis thaliana
ttttttttttttactcaaaccaaattttgtagaccctttttaacttcaagatgtctcgttgataatgaagagtaacaccaaaatttcggagacttcactattgttgcaataatgaagagtaacacattgaaaagagactactgaccacctccgccagttacagttcatatatagagaccaaacaccaacacaaaagaagaaccaagccaaaagaaaaagcaaagacaatgacaaaattacaagaatagataagaaaaagaaagaagaagattagagggagatttcacatggtgcgtgaaaggttcttccccgacaaatcgcttctagattttctccagcgtacgagcacaatggtgacacttccacaccagtcgcatataaaggaacggaatgtgttagaaatccaccagctgctatgacccaacgtgtatgcagtcgtagaaccaacagtcttgcgctttccggtgtgtcgtaattcgacccgtttgcgttcttcaccggtgcaaactcttcctccctcaacacctcaaaaagtgcagtcgaaggagcataaggaaagcaatcgaatatgaactgttctagttttagt

SEQ ID NO: 80 - DNA, 589 bp, Arabidopsis thaliana
cccaagttattatattgatatgagtttatgagatagagattccatcaacgaaacaaacattcaaacggttttgctttcttacaatcagaaaatattcttcttggcaaagttacggcattagacgaaagcattgattcttgttacttgctacatcagtagaacttggctcacttctttccacgaagcttagctccaagcgctctctccagcttagaaaggatttgctggttgggtatagctttgccagactcatactcttgaatcacttgtggcttctcattgatgatttgagcaagttgggactgggttagcttcttgtctgtcctggcttgcataatggctttctttagctcagtaggcacacgttcatgagtaaggttctcagtgtcatcatcaagcatttttgtgttcagagatgtgccgcttgatgccgccttgttggttccagcattgaattttctgacggtctcgatatcggcgccggatcgacgagcggcgttgacagttttctcgtcgcgcttggcagcggcgttagcgggtttcttacggatcaccaccggctcccaatcctgagttatcggtccaattc

SEQ ID NO: 81 - DNA, 589 bp, Arabidopsis thaliana
gcgtccgcttttctatttccgtcggactcagtggagaagaagaagaagatccaaatcgatccgttgaaaaggaatttcgaatttgctgtgcgatgtcgagtgcggtggacgctacgggaaacccgatccctacttcggcggttttaacggcgtcagcgaagcatataggtatgaggtgtatgccggagaatgttgcgttcctcaaatgcaagaagaatgatccaaacccagagaagtgtctcgacaaaggtcgtgacgtcactcgctgcgtgcttggcttgctgaaggatcttcaccagaagtgccaaaaggagatggatgattatgttgggtgtatgtattactacacaaacgagtttgatctgtgtaggaaagagcaagaagccttcgagaaagtgtgtcccttgaaatgagaatcacaagttcttgtcatgttttgatttgtatctcataataaagcaaaatgttcatttttgaatgagctttactctctccatctcttgtttgttgtcatcccatttatttcctctcagatgctttcgtagtgagttccaaagacaactaaatgactcagttttattgttcgatg

SEQ ID NO: 82 - DNA, 589 bp, Arabidopsis thaliana
  misc_feature (1)...(589): n = A,T,C or G
agcgaaaatggctggaagattgagcggtgttgcgtcacgaatcatgggtggaaacggcgtcgttgcccgatccgtcggttcttctctccgtcaacgcgccggaatgggtctccccgtcggcaaacacatcgtccccgataagccgctatcggtaaacgacgagctgatgtgggacaacgggactgcgtttccagagccttgcatagatcggattgctgataccgtcggaaagtatgaagcattggcatggttgagtggcggattagggttctttgttggtctcggtctgctcgctgttttgaacgacaaagcttctaaggttccatttacaccgagagtgtatccatatgacaacctgagagttgagcttggaggagagccatagagacccatctaagtgatctgctcatcaaaacaggaagcgtgttttcttcactgctttgttctttaaaatgtnnnntgtttcctgcttagaacttgaagacaaaagaataaaaagaagactttgtttttattatatgcgttgtctctgtaattaacagtgaccagtgagagagatccataagagaagacttctggttcaggaaat

SEQ ID NO: 83 - DNA, 589 bp, Arabidopsis thaliana
ttttttttttccaccaggaaactgacattttattcaaatcataaaattctctaatctccaaatggttactgcaaaactactgattaaagaatcatctgaaggaacaaaaattcctaagggattgataacaatgatcaatgatgaatcaacatgaagaagattaagcaacaggaggaagatttttgagatcacgagacgtatcacggtcagcaggaggtaagggtgaccacattggcatgtttggaggatagtagccgtaagggtaagccaccgccatcttatgggaatggaaagctgctggatgctgggagggcatgaaacctggtgatggaaccaccatagattttaactgttgctccatcttctccttctccgccttcaacaccagcttttcctctcgtagctcgtttttatccgcctttagactcttgatctcttctagaagcttttggttggtttcttgaagctcatgagcttcacctctaagctgattcacaacccggattgcatcgtcgagtatagctgatttatccgtctttggagtcctgccaggctctaaaacagagctcaagtccatgaacttgtcatt

SEQ ID NO: 84 - DNA, 589 bp, Arabidopsis thaliana
  misc_feature (1)...(589): n = A,T,C or G
tttttttttttttttttttcacaaaggtgagatgatcccacatcttttattatgtatgatgagatgacaagtacatataaacacacgcacacacacaaaccaacaaagcaacaggtaaagaggtcctctgggagaatcctctgttttgggagaagaggaacaaaggcttttgattagccatagcagcggatagggtccttgcagctctttgcaggtgattgagcgtttccatgcatcccacctttgacaaggtactgctgatggtattcttcagctttgtagaatttctttgccggtaagatctcagtcacaatcttatcctccagttttttctgctctttctctagagactcgcgtgctagtttctcttgctccggtgtgtagaaatatatacctgatcggtattgtgctcccaaaagttctccctgacgattcaaggtggtaggattatgtctagaccaaaacaaatcaagaagtgtctcataagtgcattctttaggatcatattgaaccctgacaanttctgcatggttcgtggtgttcgtacagacatcttcataagacggattgtgagagatcccatgagtgt

SEQ ID NO: 85 - DNA, 589 bp, Arabidopsis thaliana
ttttttctaggaacaattgttcatataatccgaacaaagaagaagacaaggacacttttttactcgccaattgttttcagtgaaaatgtaaattacaaatacggtaaaaagtaacaaactcttctgaagcatcatcttacaagaacaaagaaaatagaataacccataatgtggaacatcaagcaaaatccatcataaccactttagaaagcatgcataaggattgaagaacaaaagccaaaggttcttctttttattttagcgtaaccaaaaacataatgatgactcatttcctcaatggctggctagtttgagagtgttggccttgtcttgcagtgtaccgagcagactctcgaaactcttcttgaaggaatctactccttcgtcttccaactgttctcctactttgttccagtctattcccagcttctctagtgcactgtaaatcccttctgcttctgacacattcgcatctattgtcctcttcactattccatgatctgcgaatgcttccagggcttgatccggcatggttgatacagtgtcaggtccgatgagaggagcgacatataaggtgtcagagtaagct

SEQ ID NO: 86 - DNA, 589 bp, Arabidopsis thaliana
cggccgctacaaaacatttttatgaagtttacataaacaactaagaaaagaacataagaaaggggttcagagaaccaagaaaccaaatgttctcaactctgtaaaatggatgatttagattccttgatttacaattctaagtgaagattaattaggaatattagcaatgaaaaagctgccttggttgcccactgagcatccttggaaaagctgcaaactcgcttgtcacaacttcaccaatcaagtctttgaagattagcctctcaatgtctaacactaaccctggtgtctctccttcaatctccttccagttcatgccatggctttgcagatcctcccaaatgaggtcttcatcgtcctcatccaagatacactttgagttatcttgtaatcgatcaatctctgaacacagagtttgcagaagctcttcccctcttgaacttttttcgtgtgtcctttgcgtgctgattgataatgttatggatggttgctttgtacacccttctgcagcgaatctgtgagctaagatctcgttgatggtgtcaaatatgagcttcctcttacttctctcaaccaggttcaccgtttg

SEQ ID NO: 87 - DNA, 589 bp, Arabidopsis thaliana
ctttttttttttttttaatctaatactgtatcaattattattataatcattagagagattgcagtagagacacattgaaaaagactcaaaaccataactaaaataaccccaatagagatgggtttgctcccacggattattctaacgacaatcatcattgcaatacaaaaactaaacatttactttatatcatagcttgaaccggacagattcaaaattctcaaaccggccggtccaactaagaagaaacaatttgattccggttcattaagctctagttccggcagcaccaccaccatcgtgaccgttcttcccaccgtgaaagcccgacgagaaactagtattgagatcagaatacatgttaacaaccttggaaatgtttccgttgagttcttgaatcaaagcaacgttcttcgacatgttatcagccattctcgattggtgattgtcgttgacttgttgaatcagtgatctgtttctgtctaaaactgattgcacttgtctgaaattccggtcaagattctcccacatcgccggatcctctccctgctctgcctcctccgccacgttcctccgccgtttcgtctcg

SEQ ID NO: 88 - DNA, 589 bp, Arabidopsis thaliana
ccacgcgtccgcttaagctttatttctccgttttcgttttgtctttctttatcgtctcggtttcgtcgtctgatgtcaacgacggcgatgatctcgtgatccgtcaggtggttggtggagccgagcctcaggttttgacctcagaggatcacttttctctcttcaagcggaagttcgggaaggtctacgcttccaacgaggagcatgactatagattctcggttttcaaagcgaatctcaggcgagcgaggcgtcaccagaagttggatccgtcggcgactcatggtgttacgcagttctcagatctgactcggtctgagttccgtaagaagcacttgggggttagaagtggctttaagcttcctaaagatgccaacaaggctccgattctccctaccgaaaatctccctgaggattttgattggagagatcatggcgccgttactcccgtcaaaaatcagggatcttgcggctcttgctggagtttcagcgccactggagctttggaaggtgctaacttcctcgctaccggcaaactcgtcagcctcagcgaacaacagctcgtcgactgtgatcacgagtgtgatcc

SEQ ID NO: 89 - DNA, 588 bp, Arabidopsis thaliana
gattttcaaggagaatcttgatttgatcagatccaccaacaagaaaggcttatcttacaaactcggtgttaatcaatttgctgatttgacatggcaagagtttcaaaggaccaagcttggtgctgctcagaactgctctgccactttaaagggcagccacaaggtcacagaagcagctcttcctgaaacaaaagactggagagaagatggtatcgttagtccggtcaaagatcagggaggttgtggatcttgctggacattcagcacaactggagctcttgaggcagcttaccatcaggcatttggaaaaggaatatctctctctgagcaacagcttgtggattgtgctggagctttcaataactatggttgcaatggtggccttccttctcaagcctttgaatacataaaatccaacggtggcctcgacacagagaaagcttatccttataccggtaaagatgaaacctgcaaattttcagctgaaaacgttggtgtacaagtcctcaactcagtcaacattactctgggtgctgaagatgaactgaagcatgcggttggattggtacggccagtaagcatagcatt

SEQ ID NO: 90 - DNA, 588 bp, Arabidopsis thaliana
ccgggcatgtaccttgtgaaccaccccgtcgaactcggaactcagttggcaatatacattctcgttgcaggaattctgtgcatttacataaactatgactgtgatagacaaaggcaagagttcaggaggacaaacgggaaatgtttggtttggggaagggccccgtcaaagattgtggcgtcgtatactacaacatctggtgaaactaaaactagtcttctcttaacgtctggatggtggggattggctcgtcatttccattatgttcctgagatcttaagtgctttcttctggaccgtaccggctctcttcgataacttcttggcatacttctacgtcatatttctcacccttcttctctttgatcgagccaagagagacgatgaccgatgccgatcaaagtatgggaaatattggaagctgtattgtgagaaagtcaaatacaggatcattccgggaatttattgattgtaacgaagtctgttgttctcattttctacttattacgttaattcgaacgttggaatcatcaaaagaccgtgccaaaacaaaaatgcaaattgatgcgatagacattcttttaaaaaa

SEQ ID NO: 91 - DNA, 588 bp, Arabidopsis thaliana
aaaatggaggacactgggagcattaagcaagaagcacagtctcatcctccagggatcttcgagataccgggggagcctgcggttgttatcaatggtgtgcctgatgaacctcaaactgattgtatgattgccaaagatgaaccaatatcaagtggcactgtaggaagcggggaatggcttgagggtagagaagttcgcaagtttttcttgggtcgctactattctggtacggtgacaaagttcgataaacaatctggatggtacagagttgaatatgaagatggggattctgaagatcttgactggtctgagcttgaagaagtgcttctacctttggatgttactgtcccattgaggtctatctcattgcatatcatcaagaatcgacaaatacatgcccagctttatggatacacgccacaacgctagaccaagaactccaacacaaatgcgcagagtgaatatggtgaagcaggacaaagaggttacactcttatgccttaaaattggaaacatttgaatagtcttttgaaaatgaatatattagaagactagtatgtactagtggaatcatggaatggtagatac

SEQ ID NO: 92 - DNA, 588 bp, Arabidopsis thaliana
ctaaccgattcatcatgggcgagaagaagaacgaaggagataacaagaagaaaggaggagataacaagaagaagaacgaaacgccttccatcaccgtcgttttgaaggtcgacatgcattgtgaaggttgtgcttctcgaatcgtcaaatgtgttcgatctttccaaggtgttgagactgtgaaatcggagtcggctacagggaaacttacggtgaccggagcattagatccggtgaagttaagggagaaacttgaagagaagacaaagaagaaagtcgatttggtttctcctcaaccaaaaaaggaaaaagagaaagagaacaaaaacaaaaacgatgaagacaaaaaaaaatcagaggagaagaagaaaccagacaacaatgacaaaaaacccaaagagactccggtaacaacggcggtgttgaagctgaacttccattgtcaaggttgtatcgggaaaatccaaaagactgtcacaaaaaccaaaggtgttaatggtttaacaatggacaaagagaagaatttgctgacggttaaaggaacaatggatgttaaaaagctcgttgagattttgagtgagaagctca

SEQ ID NO: 93 - DNA, 588 bp, Arabidopsis thaliana
tttttttttttttttttttgatctgacaaatagcttttgttaaaatacaatcataacggccatagatagcctcaactgtagtatttgtaagccgtaagaagttgacattttagataacccacaatgggatttggcttctgtcacaatgcctaagtttaaaactaataagctatgggctctcataacattcgaaaacatttcacatctccccacactcagtaattacaaccgcaagtttaggccggttattgggtccaatagccacgttctcaatcttccgcataaccaacaaaccatctccaagcactctcccaaagacaacatgcttgttgtcaagccaatcgcattttgcacaagtgatgaagaactggcacccatttgtgtttggcccactatttgccatggagagcaatcctggtccagtatgtttagcagtaaaattctcatcctcaaacttgtggccgtagattgacatgcatccactaccatcattcttaagaaaatcaccactttgaaccataaaatctttgatgactctgtgaaactgacattctttgtaaccaagcggctttccagcttttctgagtt

SEQ ID NO: 94 - DNA, 588 bp, Arabidopsis thaliana
ccacgcgtccgcagctcacttggtaattgatgtggcctctttgttttctgcttaacaagctattaagagttgaggagaggaatcaggggatattagacggaaatggagattcgacttttccgaaatactgcctattcgatgatcccttggtgagtgatggaaagtacagagatgcagggttgccatcctcgtcccacatggatgtccctcatgtacatcagttagcttcatgggattgcggtctcgcttgtgttcttatggttctcagagcaagtggcatcgcaagctgcactcttgaggatttggctgagatatgctccacaaatagcatttggactgtcgatctcgcatatttactgcagaagttctgtgtggaattttcatattacacgataacatttggagcaaacccgaattattccatagaggaattttacaaggagcagctccctgaagatctggtgcgtgtcgatttgctcttcaggaaagcacatgaatctggcattattatacagtgcagatcagttagtatccatgagatttcttgtttgctattgtcggggaactatattgccattgcgttagtcg

SEQ ID NO: 95 - DNA, 588 bp, Arabidopsis thaliana
ctttttttttttttttttttaacttaaacttcaagtctgaaattcaaagaacgttgtttgcgaacatagtacagacgatcacataatagaaacgccacgataaaaaaagacaggaaattgaaaagagtacagccattcgaacatctttatttaatattatctcatcgattatataatattcgaaacatccgctagtagcttcatttgaccgtcgctcatcacctcacggtgttgcagttggtgctggcgctgattttgtaaggaatattgactttgcatgcgctaggaagtccagctgcacgggcagtgttgagaccgggaccaacggctttagcggcagattgaaggcaacggcaagcttgctgacggtctggggttgtactggccatgtttttaaggttagtaacgccgttgcagcacccttgggtaagtggagcacctcgggtcaagtaggcaatgcaccctgccaggttgccgttgacggtgccacaactcataagcgcgttcgctgtgattggaccggccacaatcatgcaagccaagaccatgcatgccaacttcatcactccagccatattgatctcttag

SEQ ID NO: 96 - DNA, 587 bp, Arabidopsis thaliana
aaaggtgaggtttaccaaaaaaacaaaaaacagagcaaagtctctgtcatgtcccaaaaaagaaagaaaggctttgatgtcgttaagcggctgaagagccatgagattgagattgatctttttcaacgagcacctcttacaagttgctcaagaaccatgagaggatactgtattatccatccgacaaaaggaatctgggaaagaaatgcctttactgttgaccaaaatccgccgaataggacaatgacaccgtatatctccaagataatgccgataatgggccaacgtacaaatattagaaagagtccaaggacgaaacagatagtccccctcaagttattaacatttgtaaatactctccaagtcgactgccaaccaagtaaaaggccaacacctatcaaccagaataagtttcctagagcgagcaaacctctgtcaaagtacaagatgactccgagaaacgtaaaggataaaccaaaaccaatgaggcccaacccaacttttttttgctcagttatttcgtacaccatcttggtaactgtagtctgagatctgtttgccagaggaaaaaggcaccattaagcaaa

SEQ ID NO: 97 - DNA, 587 bp, Arabidopsis thaliana
tttttttattccaaaggttttgacattattggtcaatgcaaaagcatcttcctaagactatcgatcctaagaaagtaagaacccaactctattggtttccgaaaaagaaaaaaagaagccaagtaatgtattggataaaaatcagattaagagactcggaagaataaaatgaagcaatatacatcaatgaaacactgggcatgatgatccataacttcaaaactagatgagccggggcttcattccttacttctcacaagggttcgttattacaaccatccattttggatttcaattgtttaatgctcggcccctggagtagtctatgttgaacagcatgttcctgcggttctcgcttcccattctgatctgaaacttcttggccaatgcctccacttgatcatcgttttcatcgtccatttccctgacacatctccttctcagctttttcaatgtctccctagagggttcaaatccagccttgatcatgtcatcaacgacggtcagagctgatttgggatcccggttaatgagatgagcatcaaccagtaatgaatacgtccgggaatcaggtttaacacctatgc

SEQ ID NO: 98 - DNA, 587 bp, Arabidopsis thaliana
  misc_feature (1)...(587): n = A,T,C or G
agggtaggaagatggtgaccattgtggatcctcatatcaagagggatgactcatacttcttacacaaagaggctactcagatgggatactatgttaaggattcatctggaaaagactttgatggttggtgctggcctggttcatcatcttacattgatatgttgagcccagagattagnaaatgnnngggtgggaggttctcgtataagaactatgttggttcaactccatcattgtacacctggaatgacatgaatgagccttctgtattcaatggtnncgannttactatgccaagagatgcattacatgttgggggtgttgaacacagagaagttcataacgcatatggatattactttcacatggcgacttccgatggacttgttatgcgtgaagaaggaaaggataggccttttgtattgtcaagagcaatctttcccggcactcaaagatacggagcaatttggactggagataacacagccgaatgggaacaccttagagtctccattccaatgatattgacacttggtcttactggaattacattctctggagctgatattggtgggttttttggaaat

SEQ ID NO: 99 - DNA, 587 bp, Arabidopsis thaliana
  misc_feature (1)...(587): n = A,T,C or G
cgcgtccgaacatggactcctccaaactctcatctctctctctttgcctcttcctcatttgcattatctatctcccccaacattctagttttgtaccggggaaggaattatgatccgaagagtcgtcccatcattccactcatgttatggaagcctcatccgccaatatacccaagacttgtaaagaatgtggctgatgggttagaatttgaagagaccaaggagatgagaaatcgtgggcttcattctcctgccttaatgaaacttactaggaatggtgtttatgttaatgtcgttggaagagtgagggaagagtttgaaacagaagagattgtgagactagattgcactcatgttgggatgagtgactgcaaacgaattggtgtgaaactaaaggagatggttccatgtgttcccatattgttcaaagatgagcagatcatactctggagagggaagaggactgntgaagangagcttgttactctatgaatctttgatctagaatcatgatcatgtgagtgatgtgacctgaacaaatccaactgtagaccaaaacttcttcatcgatacaacagatactaaag

SEQ ID NO: 100 - DNA, 587 bp, Arabidopsis thaliana
ccacgcgtccgctcttcacttctccccactccttactcctttttttttgcctttctaagcaatctctctcttcttcttatattctcatatttgattccttttctctctcatacgatctgcacaccactactaagaacaacagagctagagagacttgcaataattgtaaaacatgattggaacaagcttccccgaggatcttgattgtggcaacttctttgacaacatggatgatctcatggactttcccggtggagatatcgatgtcggtttcggcataggtgactccgactctttccctaccatctggaccactcatcacgacacgtggcctgccgcttctgatcctctcttctcttccaacaccaactctgattcatcacctgagctctatgttccgtttgaggacattgttaaggtggaaagacctccaagctttgtagaggaaacattggttgagaagaaggaagattcgttttcgacaaacactgattcatcatcttctcatagccaattcaggagctcaagtccagtgtcggttctcgagagcagctcctcctcgtctcaaaccaccaacacaacctccc

SEQ ID NO: 101 - DNA, 587 bp, Arabidopsis thaliana
ccactacaacctcaatcccagccaccggaaccaccgcctgaaatgatgccgcctccgcctcaagctctaccacctcctttgcctcactcacacccacctctggttcctcctcctcctttttctccactgttgtccccacgcttacctccaatggtcacccagttgtgtggatcagaggcttccaaacagaacatagggcaccaatggcagggtgctttgtccaaaagtggagttcattactccaccatcattgcacagagattggaatcagacatttgcaaatatatcattggatctcccgagcctgtgcaatggccagttaaactggatatgactaagcgcacggatatgaagaacgtaaaagctacttttgcgaatacacaaccacacaaaagggaggtttgtcagttaattcctgctgctttcagcgatcgcaaagggctccaagatttcataacatacttgaagcagagagattgtgcaggagtaataaagatccctgcatcaagtcccatgtgggcaaggcatctcttcattcttccacactcgcaagagacatgttccttgctttctgtttccccatcttc

SEQ ID NO: 102 - DNA, 587 bp, Arabidopsis thaliana
gcggccgccgggacagtacgttgatgtcactgggatcactcgaggaaaaggttttcagggatgcatgaaaagacatggtttcagtggaatgccggcatcacatggtgcttcattgtcccatcgaagcgggggttccacagggcaaagagatgctcctggaaaggtgttcaagggcagaaagatggctgggagaatgggtgcagatcagaggacagtaaagaacgtttgggtctacaagatcgatcctgcgaggaacctcatgtgggtgagaggacaagttcctggtgcagaaggaaactttgtgttcataaaagatgcatggtgcaagaaaccagacatctcaaagcttccgtttccaacttacttagctccagaagatgaagatccatcagaattagaaccgttggttgcagatcttggagaagttgacccatttatgttggcagagtgatgaaaacagcatgatcttgatctttatttgggcttttacaatgattagagaccagaaagaagctgtggaagtgaaggaatcacagagctaaagctttttgcagatgaatttgtctttttcttattttagttgtttg

SEQ ID NO: 103 - DNA, 587 bp, Arabidopsis thaliana
  misc_feature (1)...(587): n = A,T,C or G
gcggccgccacgaacgtgaaaactcaggcagaaaatgtttgatgtgaaaaagcttcaaaaataaaatgatttatcaagagatggaacctctattgctttcttctcgtgaggtcgctgagagttttgcctctaaaatctgaagtaagtcatggtactgagcgaaagccaagtgagactctaatgtcacgctatatgctttccacaaccgtagatcataccggaaaatatcataaagaacctcagaccgttgtaaaagagtggcaagaacaactatccattctttgaatttgacggagcacatctgagccaatagaaactctgcatctaaccggttctgtagctcactcatttgcagcttttgcccaatcagttcaagccctgcagcaaaattctgcagctgcgcacaaccatatctttctcgttgaagaaaatccacaatatcaaactgggtgcctttgacgaatgcaacaagctttganngntctttaccagacatcaagtaactggcatgactttcaagtatgctctttacannngcaacatgaggactttgctctttgaacgaggagctcttatcgagtgatgat

SEQ ID NO: 104 - DNA, 587 bp, Arabidopsis thaliana
  misc_feature (1)...(587): n = A,T,C or G
gattccttcttatgtgattgtaaagagaagatttttcagagatgggtctcttcgaatcggtgaaatcaatcgattgggaacaagaatcgttcccaacttatcaagatttagggtttttgcctctctttgcagtgttcttccctacaattcgatttctacttgacagattcgtcttcgagaaattggcaagtcttgtgatctatggaaggatgagtacgaannngngtgacaacataaaagacaggaagaaaaatagtccaaaagttcgaaaatttaaagaatcagcttngaagtgtatttactatctatcagctgagctacttgctttatctgtcacatataatgaaccttggttttcaaatactctctacttttggattggtcctggagatcagatttggcctgatcaaccaatgaagatgaagttgaagtttttatatatgtttgctgctggattctacacgtactctatattcgcgttggtgttttgggaaacnngacggtctgatttcggagtttccatgggtcatcatatcacaacgcttgttctcattgtcctctcctatatctgcagattaactcgtgct

SEQ ID NO: 105 - DNA, 586 bp, Arabidopsis thaliana
atcagattccggtgttccaaggaagcacatattttaagatccagaatcgcctgagagatgtctaccttcagtggcgatgagaccgctcctttcttcggcttccttggcgctgccgctgcgctcgtcttctcatgtatgggagctgcgtacgggacagcaaagagtggtgtgggagtggcatctatgggtgtgatgaggccggagttggtgatgaagtctattgtcccagttgttatggctggtgtgttgggtatctatggtttgattattgctgttatcatcagtaccgggattaaccccaaggctaaatcctactacctcttcgacggatatgctcatctctcttctggtcttgcttgtgggctagctggtctttcagctggaatggccataggtatcgttggcgatgctggtgtcagggccaatgctcaacagccaaagcttttcgttggtatgattcttatcctcattttcgctgaagctcttgctctatacggtctcatcgtcgggatcattttgtcctcccgagctggtcagtccagagccgaatgagaaaagagtgcggttcttgaagtccgcatgattc

SEQ ID NO: 106 - DNA, 586 bp, Arabidopsis thaliana
gggtaaactttcagttcccacaaaaccaattgcagaagtacaaatctagcctcctgtcttattgactcttcaaacaaaatttgtatgtttggctgaaacatgtaagtaaatgatttaagatgacttggtgacttcatgtatagcattcgcaaggtatcccacgtttcctgttgtaacaccagccatactgatacggccgttacgggtcatatagatgtgatattcgcttgttaagcggtcaacctgttctggtgttaacccactgtagcagaacattccaatctgtttggtaacgtgctcccatgacaaaggcgatcctaacttctcaaggctttctcgcaaagtagttctcatgccgatgatcctatcagccatgaccttaacttcttttagccacagactctttaactctgggtcttcaagaatggttgagaccagctgagcaccatgcaaaggtgggttgctgtacattggtctagctagctgctgcaattgacttttcacagccacggcttgcttcggatcttcacaaagcacactgagacatcccaccctctggccgtagagtcccatgttttttgcatag

SEQ ID NO: 107 - DNA, 586 bp, Arabidopsis thaliana
cttttttttttttttttttttttttttttttttttttacacaagtgctttattattctgggcaaaaattcagtgccttttacagtagctgtgttgtgagtatagaaaatgaattgatacaatgttggaaaattcttggtgtaaataaatgatacatgtgaatcagttcccaaatatttgcttatgtggttctccagtagatattgaatcagagggagatagtgtggctgctccccactgggttggttccatttttcaacttccgtttttcagttacaaaatgatctcgtcttgaacactgacgttcagtgtcttgtttggaagaacaatactgctggtcaccacaacctcgtcttcaactgcaaccgagtctccgagaattgtaactccgagtttcgaattgtagactccctcagcctggacacgggaccatctcccgatagaagatttccacccaacaattgcgttagtcaccactgcattttccatgatctcaacatcgtcaaggatgatgcagctcataagcctgacgcccggtccaacacgagcatttgcagagattgagacgttgggaccaatctttgcag

SEQ ID NO: 108 - DNA, 586 bp, Arabidopsis thaliana
gagaagtttgaaggactctgcaaagtgatcaaagacgttttgggtgacaaggtcgagaaggttattgtttctgaccgtgttgtggactcaccgtgctgtcttgtaaccggcgaatacggctggactgcaaacatggagaggatcatgaaagctcaagccttgagagacagcagcatggctggttacatgtcgagtaagaagacaatggagattaatccagagaactccatcatggatgagttgagaaagcgagctgacgcagacaagaacgacaagtctgtgaaggaccttgtgcttctcctctttgagaccgctcttctcacttctggtttcagccttgatgagccaaacactttcggaagcaggatccacaggatgctgaagcttggactgagcattgatgacgatgatgctgttgaagccgatgctgagatgcctccccttgaagacgatgctgatgccgaaggtagcaagatggaggaagtcgactaatttatcacacaaaagtcgactaaattattagcggtgttataagactatggttttctttttttcttttcgttaaaacttatgttattttggtgat

SEQ ID NO: 109 - DNA, 586 bp, Arabidopsis thaliana
ctttttttttttttttaatgatgaaaaatcaagttgatgtttaaaagtagcttacaaagttacaagttacaacaaccatggaacacatacaaagaagaatcctaaacaaaccctaaaattcacacacataacaataaaagcttctaaaaaaccagcaaaacaaatctatgagataatttggggattggattcaaattttaaacgcctgctattgcgttgaaatcttgataacgagacattgcgcctttgaactcgtgttcttctggtttgtgagagctcaagctatgcggaatgtatgctctgaaaatctcctctaggtctggactctgcttcagctcacggcaagctacctcgagagctgtgtgttcgaaccctccgtagaatttctggcggcacacatatccgaagatgagagaggtgataatgagagggatcacaagggccgtgtagaagaatgtcttggctcctaagtagccaaacattaccacttggaatagaaacaacgctgctagtatgcgctggtgaatatgcggccacattcttccatagctctcgtatgatggaacgtacactttcaacgcctgat

SEQ ID NO: 110 - DNA, 586 bp, Arabidopsis thaliana
tcgagcggccgcccgggcaggtaccaaaatgatcataaaagaccctgaaacaattcaagaaacccgagaacagtctcatagtattcatatttttacacagaaaactccaaattgaattgtataaaactcataaagcggaacacaaatacacgttacatttgaaaaatgtagtcttctatcaatctattctctccaacggtgactacagttcgggttgcagcaaacgaaaaacagagtcattccttcttcgcctctagccgtggcctggaagaagacagcttcaccgtgttgacacttggcgcatcgcacagccttggtacgtggaagagttgggtcggaagcaacgtcagataggatctgagtttgttcacttacagagtgatgaacctcgtttctgtacacacaattgttatctgctgcttcctggtgatcacaattacggcacgcgtagaggagaattgattgctccttgtcttccttgggatatagaatgttattacattcgcgacaaaatttcatagtactcatcttcgcagaatctttagataacgagcttttgaatgcttctttgatttcacaatcagtc

SEQ ID NO: 111 - DNA, 586 bp, Arabidopsis thaliana
ctttttttttttttttttttgaatatcattcacttatcatcttatttattggcaattaatgttaagtggaactaatatacaaagacgcaacataggcttttatactgtaaattaaacaactacactatattctgaaaaacaaatcattcactttgataaaaatattcagcactgagagagattatatcaaaccccaaactgatgtaattcacaacaaggcctctcctcctgtctccctcataagccattttcgtgcatttgttgcctctcttctgctttctcctctcactccagttctttgagaaagtcaatgttgtccacaaataccgatttccaaccatcaggatccagacacgcggtgatcttcgtgctaatacctggtaagggaccaggctccctcgtgatttttcccccaaagagttttatagcttctgcagttttgtacacatcatccgtccctattgctatctgagcataagcatttcctttatcatattcagtgacaccatagttatatgtcagctctaggacaggaaatttatcttctggaccatatcccatcatggctattgtgtacttgtactct

SEQ ID NO: 112 - DNA, 586 bp, Arabidopsis thaliana
  misc_feature (1)...(586): n = A,T,C or G
ttttttttttttttttttttttttttttttttttttttttttttttttttttttttnaaaaaaggcaggtcgtgatatttcatttcgtttttgggtcaaacatggcacaattggttagaatcctgtattttttgagtagcaacaacataaataaactggaccgaatctcacaacaaagagctacaaaatttcctgaacaaactcaacacctgcccgggcggccgctcgacgcgccggtcgcggccgaggtacttgtgttttctccaaggagccatatgcattttcttgtctctcaagcatttctttcccgcgatgcacaatatctttatcagagatcgaagcctctcggttttcccgacgtaaacctcaggcaatcgactgattagtcttttgtactcttcactgccttttgcaatctcaaactctgccctaaatgataactcaatcaccactcgcatctcgcttttctttgaacccgatcggtccacaatctctataaattcgtgttcccctgcagggatgtcttgacaacttctccatttagatttagagatgacgcaatcgacctgcccgggcggccgctcga

SEQ ID NO: 113 - DNA, 586 bp, Arabidopsis thaliana
ccgaggtgacaccaagcaaaaaaacaaagacagacaaaaaaaagagagagagagagagaaaaatggctaagggatcgtggttcttcattatcctttttatcatctcaatgttagaaaatatgatcaattctctagaattagatcggcatagttttcctgatgatttcatctttgggacagctgcctcggcgtttcagtacgaaggtgcaacaagtgaaggtggcaagtctccaactatatgggatcacttcagcctcacgtatccagaaaggaccaaaatgcataatgcagatgtagcaattgatttttatcatcgttacaaggatgacataaaattgatgaaggagctaaacatggacgctttccgattttcaatctcgtggtctagattaatacccagtggaaagctaaaggatggagtaaacaaagaaggtgtacaattctacaaggatctcatagacgaacttcttgctaatgacatacaaccttcgatgacgctctatcattgggaccacccacaatctttggaggacgaatatggtggctttctaagccctaaaatcgtagaagattttcgagattttgc

SEQ ID NO: 114 - DNA, 585 bp, Arabidopsis thaliana
  misc_feature (1)...(585): n = A,T,C or G
ttattgttttaagaattatataaagatcataaaatctgtgggtagagaaaatatcaaaagggaaaagtaggaagtttcttattgcctagaaaatgatgaatgagctgaagagcttctctaggtttaaatgtcggaacctggtgtcccgctcctcttaccgtcacaaacattaaaccgtcatactcgaccgtccaccctccgacctgtagtttggtgtaccaaggtgtccagtcttggactatcttaagacctagcttctttagtgagtatctggttgcggtcacggggattcgcccgtctgtatccccactgaaaacccatacgcgtaatcccgctgaaacaagtgttcttaaggttggaagcatagaagcgggagcgtcagaccagaatgagacagtgtcactgcaatgagtccaagggtaagagntattggtgacattagcgtgaagtgcctcctgaacatctttcctgttcatatacttttctgtatactctgatgcacatggatcgtanncggcgnncatcctcctccatccttcattgtgagagatgagacggggtcgtagaacgcttcggaatgcgggt

SEQ ID NO: 115 - DNA, 585 bp, Arabidopsis thaliana
tttttttttaaactgtttaaatttaatacacaaaaacactacaaacaaccactagcaagtagcaatgcttataagggatcactcaagtggattgaggttgtatataccaataagtagacacacgaaatatagctccggtaagctggaaaattgagcaaaccaaactgtatggttaatgtcagtcatctccccaagcatcttcccgttgtttctgtctcgagacaatccggtttttccgggcagcttcttggtctcgctctttagacccgaatccagaagccggtagcttcaatcccatgctgtgagcaatcaaccgttgagctgttttcgctgatgtctttggtctttgagacggcggttccaaatcttttccagaaattgagcccaaaagagaatcgttatcatcgagtacacgtattgtgaatgaacattgaacatgcttgcaagcctctagagcagctgaaggggttttgaagactgcaagtgctgttgtatcattgacccaacgaatgataaatccactatctttgaagtctttaaatagcttctccaattcagtagttctcaaacttggagaaaaaccag

SEQ ID NO: 116 - DNA, 585 bp, Arabidopsis thaliana
ttttttttttttttttttaatgaatttatagacattataaaggacttttttcaagataatattgttatatttggttcatttttttcttcctacatcaatcaaccaaatgtaggaacatttgccatgtacaaaatgagaccattacaaacaatgtaccaaccaactgttgtgtgaccaaaaatcttaccctgagagtctgattttgttgttcgcttgagtttctttgatgactttagaagcaaaacctggatcacaattaaactccagcctcttcaatcgcagcagacattgaagctgatgcttcttctagcgttcgcctcttttgaactgcgttaaaggcctcgatgatgtctccttctatccaatcatcgtagtcatccataccaataccacattctaatccagcactcacctctttcacgttttctttaacccgtttaagagaatcaagaacaccgacatggacagttttacccttccggaccaccctgatgccacaatctttgacaaattttccttcattcaccatgcatccagccacacgaccacttccactgctgaaagtagctcgaacttctgctgagc

SEQ ID NO: 117 - DNA, 585 bp, Arabidopsis thaliana
  misc_feature (1)...(585): n = A,T,C or G
tacgacaaagagtgagagagaggatcgctcaggtttgttcatcttcaccggacgattagcttttgcggtgggagaaagaacggcctgtcttcagctctgaaacagaggaacagagaggttaggaaggagacaatggttggacccgcgcggcctcagatcgttttgtttggatcttccattgttcagatgagctttggccatggtggttggggcgccattctctccgaggtctacgctcgtaaggccgacatcattctgcgaggatattatggatggaactcttctcgtgctttggaagttgtcgaccaagtgttccccaaggatgctgcagtacaaccttctctggtcattgtctattttggaggaaacgactcaatggcgcctcactcgtctggtctaggacctcatgtaccacttactgaatatgttgataacatgaagaagatcgctcttcatcttcagagcctttcagactccacccgaatcatatttcttagttctcctncagtggatgaggctaaagttcgccagnnnnaaagcccatacttgagcgaggtaatccgcacaaacgacctctgcaagact

SEQ ID NO: 118 - DNA, 585 bp, Arabidopsis thaliana
taaaaagatacagagaaagcataattcagcaacttcagagctcaattccgcttcttcaaccatcgaaaaccacaatatctcttgaatcagctgctacaagtcgcagatctgagctgctagccaatttttgcgataattcccgcgcacagattagtaatagaataatttaaaaagaattcaaaaaccgtcgaagctctgtcgttcatggagcttcctcaacctcgtcccttcaaaacccaagaatttcgcacagggagaaaaccaacacatgattttttatcgctctgcagtcattcaaccgtccacccagatccaaagccaacaccaccaccttcttctcaaggtagtcacttgaaaacccatgattttcttcaaccgttagaatgtgttggtgctaaagaagacgtaagtaggattaactctaccactacagcgtccgagaagccaccgccccctgctccacctccaccgttgcagcacgtgcttcccggtggtatagggacttatacgattagccccattccttacttccatcatcatcatcagagaattcctaagccggagttgtcaccaccaatgatgttc

SEQ ID NO: 119 - DNA, 585 bp, Arabidopsis thaliana
  misc_feature (1)...(585): n = A,T,C or G
cggccgccttttatgttagaagtattaaaaattttgatcttccataactggacagtgtcagaaaatgccaaagtattacaacaaagtttctgacgacaatccacgaacacattaaggagatcgaaacgaaataaaaaccgcacaaactcttcatgaaacgctaagttnnngagtgaaggtggttcttggtactcaagtttgagaggattcattggaatgaagttcttcactgttttgctgcaccatcaaaccttttacctatagaatccagatgttcctatgacttaagaataatccttttctcctcaatcttaaacttctcatcatcatttgcatcacctctttccactgagctgctagatggtggattctcttttgacttctccacatcctgtgatgacatcgaatccaatgacaataaatgaccttcaagattcctttcctgctgactagaatctgaatttgcatctnnatcgtcaactttctcataatctgagtggggtttctctttcacagattttgatccnnnntgtcttttcttgatcttatgatcctctgaactaacaggagataatgatctatcgc

SEQ ID NO: 120 - DNA, 584 bp, Arabidopsis thaliana
  misc_feature (1)...(584): n = A,T,C or G
cagcagcaacaatcagagcaacaatggagtctgctaagtcaaaaaatcccgatagctaccaaaatatcttgatgatgcgtcacggtgatcgcattgacaaaatcgatccactctggcttgatacagctgcgagaccttgggatcctcctctcgttcaagacggtatggttcgtgcgtttcaaactggtcannngattcgatctcagatccaatttccgattcaccgtgtcttcgtctctccttttatccgatgtatacagactgcttccgaagtcatcgctgctctctccgccgtcgatttcgatcctaacgntacttcgtccaaagacgtcacttcaatcgataaatctaagcttaaggtttccattgaatttggtttgagtgagatgctgaattcaattgctattaagcctgagattgctcccaaagatgggaaattcgatttcatgatttcagaacttgaagcgatttttcctgatggaatggttgatcatagtgtagatcctgtttataaagagatgccacaatgggaagagactgtggaaggctgcacagatagatttcttagtttgataaagactctt

SEQ ID NO: 121 - DNA, 584 bp, Arabidopsis thaliana
  misc_feature (1)...(584): n = A,T,C or G
gctttgggtttatcttcttactatgcttcttcagctctacttttgcactcaggattcttaaggacctccctatgatggagccaagaaagctagatctgaaccatgaaatgatgcctgggatggttatgctacagccagatcatgaggtccaacctgagcacacggtcaagcctggccatacactccagtccatgtccggtgtatcagaacatccagagcacacggttaagcctggccatacactccagtccatgtccggtgcattagaacatcctgagcacaaggaaaagcctgaccataaactccagtctatgttgggagaacatcctgagcacaaggaaaagcctgaccataaactccagtctatgttgggagaacatcctgagcacaaggaaaagcctgaccataaactccagtctatgttgggagaacatcctgagcacaaggaaaagcctgaccataaactccagtctatgttgggagaacatcctgagcacnnngaaaagcctgaccataaactccagtccatgtctggtgaatcaaaacatcctgagcacaaagtcaagcctgatcagataatgcag

SEQ ID NO: 122 - DNA, 584 bp, Arabidopsis thaliana
  misc_feature (1)...(584): n = A,T,C or G
ccacgcgtccggtttattcttctctgctgtatcaatcaaatcaacggagtttgagtttcttttccgattccggcgatggggtcagtccccgatccaggcgagttaactgagttagctcagccgagtttcgaggagtttcagaaacagacgtcgttgatgactagctgtactcttctatggcaagagctctccgatcacttcacttctctagagcagaatctgatgaagaaatctgaagcgttgaagcagatgattgaaactctagataaccagactcagacctcgctcgagtctctgaagcgtagagaggtaacaatcgaccatagcgttgagatcgtagctgggaaagtaggtgaacgagctagagctgctcttgaatcgttagagaaagctagagatggttgtggtgatggttctaatgatgattccggtgatgttgacgatgaagaaggtcttctctctgctttgaaatctctttgtcttaaaatggatgcgagaggtttttggaactttgtgacggcgaggaagnnnnagttggagaatctccggtcaaagattccggcggcgttggttgattgtgtaga

SEQ ID NO: 123 - DNA, 584 bp, Arabidopsis thaliana
ggagtataacggttacggttatcctccacagccgatgtattactacccagaaggacaagtatacggtcaacaacattacatgatgcaaggtcaatcatcgcaatcgtatgtacaagaaccgtattcgaaccaaggatacgtgcaagaatcgtatatgaaccaaggttacggtcaagggtatggacaagaagctccaccaccaccatatatgaaccaacaaggttacgcagatccttatggtcacatgcgtgcgcctgagttgtttagtgatgagaatccaaatgggtgttctgtgatgtgagtaaaacaaatggggaggaaaatgtaaataactaaaacaatatagggtgagaatgttagctatgacaaaaatggtatactacgaaagcacggaaacttccgagtccggtaatctaaaccggcaagattggccggttagaaccggtttttgagaggcgtggattggttggttggtttatttcttctatataggtactataattttgtatcgtaataatcttctgtttttaactttttgtgctatgtaattgtcaggtgatcataatgaaaagaaaacatattag

SEQ ID NO: 124 - DNA, 584 bp, Arabidopsis thaliana
  misc_feature (1)...(584): n = A,T,C or G
acggtgtgatcttatgggaactctttacgttacaacaaccgtggggaaagatgaacccgatgcaagtagttggggcagttgggtttcagcatcgacgtcttgacattcccgactttgtagatccagcaattgcagatctcatcagtaaatgctggcagacggattcaaagttaaggccaagttttgcagagataatggcgtctctaaagcggctacagaaacctgtaacaggttctaacatcccaagaccagtccccagttcctcttcattaccaactgaacatgaacaaaaggattgataacagaagaagacgaccaaagtggcaaacacatttttgacgaattcaatctgtttgaaggaaaaaaaagctacaaatgttccttctctgctactttttgcctcagcttcagtgtttgacacagcttgtgaattgtgaaaaagaaagattcatggaagatgacgattgaagaaggtgaaggattgtgcncgtgtgttttgttgtctttgcntgcaagcgatgttcatgttcatgcgtaatttcctctattttgttttccaatattgaaactgtacaaagagagaa

SEQ ID NO: 125 - DNA, 584 bp, Arabidopsis thaliana
catagatccttcatgacattgtatgataatcctcattggatttttatttacattaaattcttaaagcaaataaaaaacaaacaaagaaaccaaaactctactgaagctgattgaaaggagaaagcttccatgctgccgagcgcacgaccttccactccaatcccataagaactgagcaaaactcaagtaaccatcggaactggttttgctctaggtaaacccagaggccaagaaccgattttgctcaggggacccgaaaaaaaactaaaccccactaaaccggctggctgctccgagaactgacatctttaggtactgcaatatatccagctgctgctactactactatcacgcaaactatacagggaaatgtttattcagtctcatctccctgcggagaccaatgttttttcgtcattggagctcatcgaaggaagaggaacagggagacttgggtttgaatcaggagtggctgcttctttctcaactggtacaggctttggtgtgtaagtaaagttgagttctttgttggctgcaagtgccacaagctctttctcttcaaggcctttggtcggtccgaggct

SEQ ID NO: 126 - DNA, 584 bp, Arabidopsis thaliana
ccacgcgtccggggatcgctagttcagacaccttctcttcttcttcgttctccttcgaggtcaaaatcttcttaatcgaggaagagcaagatcttctttaagcagtcatggccaagcatcatcctgatttgatcatgtgccggaaacaacctggcattgctattgggcgactgtgcgagaagtgtgatggaaaatgcgtcatatgtgattcctatgtccgcccgtgtactctggttaggatttgcgatgaatgcaactatggttcgttccaagggcggtgtgtcatatgcggaggagttggaatctcggatgcttactactgcaaagagtgtacacaacaggagaaagatagagatggttgtcctaagatagtcaatcttggcagtgccaaaactgatctgttctatgaacgtaagaaatatggattcaaaaaacgatagtagtttgttgttacttgagctattgatcttttatttattgatgctaggaaagtgtctgtacttgtcttgtttgtgttaaggaaattttatccggtgaagtaatttaagacatgggttcaaactaaggattatggtttgttgaaa

SEQ ID NO: 127 - DNA, 584 bp, Arabidopsis thaliana
aagcttgatatcgaattcgcggccgccatgagtttaccggtttacaggctaataggatgtggccatcggagctgctgctaaacagtacagtggctatgaacagtgtcaatgttgagaaaaacagatacagtgatgttgttccatttgacaagaacaggattgttctgaatccatgtaaagactcatctgcaaaaggatatgtgaatgcaagcttaattaagacgtcggagtctgagagtatttctcagttcatagctacgcaaggtcctttaccacacacgatggaggacttctgggagatggttattcagcagcattgcccaatcatagtgatgctcactcgattggttgataataataggactgttaaatgcggggactattttcaagacgaagatggacctagagaatttggcaacatatctcttacaacaaagtggataaagactactgacacttcattgatgttacggaatcttgaggttaactacaaggagacagaggatcagcccatgtccgttttgcatattcagtatccagaatggcctgatcatggagttcccaaggatacagtggctgtccgt

SEQ ID NO: 128 - DNA, 584 bp, Arabidopsis thaliana
ttttttttttttactaagtctcaatgcatttatttaaccatgtcgtaggtttagcagatagctttgattacaggtaatatggagaaacagacagagacacagaggattacaaggagctaaaagagactgacagaagagagtaagcaaagcctgtttcattaaccttcaaaccgggatctcacacgtttcaccgtctttagtcagttgtgcttttccgccttctctcgttgtgtccagctaagcgtctcctgcaactccgcttggcttcatcaaactcactgagcgcgtgaaacctgctgcattgttggcagaaacgttggtgaagaccagagatccgaacatgaggagctttggcatgaaactggcagactttgtgtcgtttgtggtactgtttggctttgctcatatccgcggtacaactctcgacctgacaaactccactactacttgtagctttacctttctgcttcttctccaaagcctcttcttcttcaaaagtatcttcatcttcagtttcttcttcttcttcctcttcctcactcagttctcgtaagctcctcttcccttccgctttgcttcttctc

SEQ ID NO: 129 - DNA, 584 bp, Arabidopsis thaliana
ctttttttttttttttttacttgagcaagaaagttgtattattcaactttctgtgaagcttttataaaccaaaatagatttcattatgagtgatttattagactggtgtttcatggactcttaaagcttaaacatgtatctccggtgaagtgggtgcaagagcttcggtcatggctcctttgtctgacatgtgtttgtcttgtcctgatgtgaaaggtggacaatggggacagcttggtgggatatagtagtgtggtgggttcggattgcagccacctgtttggcatccagtaccgtagccaggaactgtgatacctggaatcacaaaaccgggaatctgtgcgcctggaaccactatcggagggattcttgtgcctgggactactacactaggtccaccctgtcctataccgataccaatcccttcccctggaccactaccttgtcctatgccttcaccgaatccgctacctggagctcccgtgacagggccgcaattgggttgggcagacccggatcctattccttctccaatgccaatacctgtaccaccaccagaaccaattccttcaccaaagccgctg

SEQ ID NO: 130 - DNA, 584 bp, Arabidopsis thaliana
ttttttttttttttttacttgtactggtccgtgagaggaccacgacatcaacttgactatgatgataaacatacatactgtgaatgaaaggaccacaataatattataacagacttaacaatgcaagcaaactttttcaactaaacataaacaaggattagcagaagagaaggaaccaaaatccaaaacacttattattgcttttttaataggaagctacctaaaaatatatctaaacattttgctgaacttaaaaggccatatttgagcttgacttatactttggtgaacttcactcttttccatcagccgcgcggagtgagcctagctgaaccggtgcttgagttccaaccacctttgatgacccgtaaagcgacacatcgcttccctttgctttctctttctcgatctgttcctttatccagaagtaggttattctaagcccctccttcaatctcatattaggagcccaaccaagcttttctttgatcagattgttgtctgagttacgaccacgaacaccttccgggccaggaatgtggtgaattggaagcttcttttcctcaaagctgagaaccatctca

SEQ ID NO: 131 - DNA, 584 bp, Arabidopsis thaliana
ttttttttttttttgaaacaaaagtttattttaacaatacaacaacattgggaaaaagaaaaacaaaaaaataaaatacaaaaaacacaacaattttttcagcccataaacccaaaaaaaaaaaagatacttcttttaaaaacccaaactttttttgtctttcatttgatttgtttttttggggttaagaaccgtttaccttacaaaaccacatttcaagctttaacttcagtcttcttgttgggctcaaacacgaacttgatcagagactctttgatagacatcaactcagggaactcagtcttcaacttagttgcatcaagctcattgttactccttggcgccacaatcactttagcttgttcctccaatgtgaagttcttccaagtaaaactcgggtcaatgtagtctctgtacatctccaagatctcgttgtggctcacaacacccgggttagtgaaattgtagatcccggttaagttcctcttcgccatttcgattgatatcgggagaagctcatcgaggattgtcatcgagtttgggatgtccacaactttctcataccgagcaatcttcgtgatgaa

SEQ ID NO: 132 - DNA, 584 bp, Arabidopsis thaliana
ggatcctctagagcggccgccctttttttttttttttaaaataaaacccaactccatttatccatcaaatgtgtaaaacccatctgctacatttcaaagattcacaatctcacacatacttttttctttctgaaaccttcaaacgatttgttttgacaaaaaatagttgtcatttttgttggtcatgctcaaaagaaaaaaaacgcaaataagaggcatgacaacattaaatcccaattacaaattgtaaaaaagaaaaaaatatatattatttacactcgttcatctggtcggagccgttcgaaagaccgttcaccagcttcaatcgatgtcggaagattcttcggcgcatctccggagaaagtagaccgtacggaaccactccggaaagagaatgaaaaagacagcgaatgaagccgtcgattgttattattactcttacgtccgtacgggaaagcgcttctctcgctcccgacgctaccgcttctataaccgctccgtgaactcctcgcctgaggtagtaacgccacgtgtcccatcgtcctcgatgtcttcataagttgccgtcgtacatcatccggtaa

SEQ ID NO: 133 - DNA, 583 bp, Arabidopsis thaliana
aataagtaagagagatcaagaaacattttacaacattctagtgatctcatcgtaaagcacgagcctttgcgtgttgcaagacttctttgagtaccgaagctattcgatgtgacatatgatgttccaaaaacatctcttttactctctcatacccattttttcccattctcagccgtaactcaacttgcgtcgccaacttcactatgttcttggcgagaggtatcactccttctttccctgcactatgtaacagaccagtcgttccattcactacaatctccattgttcctccggctgcagtaccaagtacaggtagcttaaaggccatggcttcgattgttattctcccaaagcattctcctctggcttgggagttttggacaagaacgtctatggctgctatatatggtgctacggttagagttttgttgacgaagtggacaaagttctcaagtttcttttctcggacaaagttgcgtagctctgtctcgaactttgtctgcttgctcatgtcgcttcctactactactgcatgcattgttggtacctgaagtttcttctctttgattctttcaagactttc

SEQ ID NO: 134 - DNA, 583 bp, Arabidopsis thaliana
gaattcacaatttctcttcttctaaatccatggagtgatgatgatgatagatagattgaatccaaacacaaaccggatccgagattaaaaacaatccggattgtttatatttactttagatcggagaaagatgccgccggcgaccggagatatcgatcgtcagatcgagcagcttatggagtgtaaagcgttatctgaaacggaggtgaagatgttgtgtgagcacgcaaagacgattcttgtggaagagtataatgttcaaccggttaaatgtccggttaccgtctgcggtgatatccacggccaattttacgatctaatcgagctttttcgtatcggtggttcttctcctgatactaattatcttttcatgggtgattatgttgatcgagggtattattctgtggagacagtctcacttttggtagcactgaaagttcgttacagagatagacttactatcctaagagggaatcatgaaagccgtcaaattactcaagtgtatgggttttatgatgaatgtttgaggaaatatggaaatgctaatgtatggaagcacttcactgatctttttgattatctt

SEQ ID NO: 135 - DNA, 583 bp, Arabidopsis thaliana
cgtaagctttgcaagaaggttcaagaagcctactccgaaatcaccgaacgatcttccttctcctgcccctggagacactcgtcacaaactctacgtatctaatctcgcttggaaagcaagatcaacacatctccgagagcttttcactgctgcagatttcaacccggtctcagctcgggttgttttcgctgaccccgaaggtagatcttctggctatggctttgtctcatttgctactagagaagaagctgagaatgcaatcacaaaactcaatgggaaggagataatgggtagacctatcactctaaagtttagtctgagaagcgccagtgaatctgaagatggtgacagtgtagaagctaacaacgcttctgaagatggagacactgtagaagacaaaaacacttccgaagaaaacattgtggagtgactcttattattttctctgttatccgataggagcatgagaatctgactagagatcttattacagttttgaaataactactgctacaaagaacacaataatgaagatgtaacagaaattcagtaaactatacttcaatcaaaaaaaaaaaaaaag

SEQ ID NO: 136 - DNA, 583 bp, Arabidopsis thaliana
  misc_feature (1)...(583): n = A,T,C or G
cgcgtccgcaaaagccaaataatagaaagagtatggaagaagatgatggagacgcgtctacgccgttttggcttcaatcacgccgcaataacacttacttccgccgcactgcaagtctcggtggccgtacaaccaccatcgccactcaaatattcttcgccggaacagctgcaatcctcatagtcgtcttcattatccctcctttcttctcctctgtttctcagattttccgacctcatttagtccgtaaaagctgggattatctcaacttcgttctcgtccttttcgccgtcctttgcggcttcctcagccgcaacaccaataatgacgaatccaatcatcacaaagaagaagacattcgtaacaaattctcgacttcaccatcgattattgatcgaagaagtcgtgtatctaacagtggtacaacgccgcgttattggaacgatgatcgcggtggtggcggcggtgatcaaacggtgtacaagnnntttagtagattacgaagtgttagctcgtatccagatctnnnnctccgggaatacgaagccgatgaacggtggagattctacgatgatacacgtgt

SEQ ID NO: 137 - DNA, 583 bp, Arabidopsis thaliana
ctctagagcggccgcccttttttttttttttttctgacaagtcttcccttatttctttcaatatctgtttcaatatcgaattcacaaacccaatcaaatgaacagccaaaaaagctcataaattgagtcaattaagaatcgtttcgaattgaaacaaaaacatctacacacgaaagatgaaacctttggagtaataagatgacatccacgacgtagcggtggaagcgtgatggttttctgagcccacttagcaccagaggaactcgccattgaagctctatcggtagccggattagctggagtcaaaaccgatctcacacgcagaggaacaacaccagagaacaagatcgtcgagctcatagctttttgtgttcctctaagcccagtaataacaacaacaatggccaacacaatcccacctccaactccaaaccaaaacctcccaataaggcctttcactttcaccatcatcaccattcatttttctcattttactttgcttctgggccttagaattgatttctataaacggcatgtagttcacctctcatttctcaaaataaaaactacatgccggttttta

SEQ ID NO: 138 - DNA, 583 bp, Arabidopsis thaliana
cacttcttcttgatcaataacttccatagtcaaaagtatcagaagaaacaaataaaattaatcaatcaaatccaagtcccctaaattactgtatggtttccaccaaaaattcgatgtccactagatgataaaccctaaactcaaggagagacaagaagccaacaatttttgccttgttcttcctaacatcacctaacctgagtgagtttttgttgtcctatagatagatgctcagattaagcttttagtttcctcagctaacttgttgctgatgaccaccgtacattggatagtaaggtgcagcgggatacattctcgggtcaggttgaggtaccatgtatccatacccattgtaaaactgtcctccatagtacggatcaacccattggtttccatacttatctctaggctgcttattggcgggattacgtccccaagaaagccgaactgtttgttttccaattacagtcccatttagtttctccaaagcctcctctgcatttggtctgttaacaaactgaacaaatccgcatcctttaccaacaggaatcttgacagagactatttccccgaattcattgaa

SEQ ID NO: 139 - DNA, 583 bp, Arabidopsis thaliana
ttgcaaaaatgggaggcaacgttattactgagcagcaacgtagaagactggatcctgcatcaagtgaaccgttgtttaccaactgtaccagggactttataggcacacttgattacatattttacacagcggacacgctaacagtggaatcgttgttggaactgttggatgaagagtccttgaggaaggacacagctcttccatctccagaatggtcttctgatcacattgcacttttggctgaatttcgctgcatgcccagggccagacgaaacaatattttatagagatactgcagctgtaataacccgataccaaagactggttccaatggatatggttaagctacatgaagtagatagcatggccatgtccctggggtttctcccgctgggtttttcgcttgcgttctactctgtatcacagttttatttactgcttggttcgcttggcttttctttctatagttatttcctctttgccagaaagttttgtcttcactggcttgtgattgtaacaatgtaaacaattagattcttcaagaaaatagtgacttcaccttttccatattaaaaaaaaaaaa

SEQ ID NO: 140 - DNA, 583 bp, Arabidopsis thaliana
  misc_feature (1)...(583): n = A,T,C or G
cctctagagcggccgcccttttttttttttttttttttttttccaagtgacgaggaacattatgattttcatttaaatgttttaacaaaaaacgacataaagtgtatctcacagagaataatatctcagattcacagaggtcaaagacaccaagtgatccagagtagtcaagggaaaagacagaagtaccccttgccaaagtgatccagagcagaggaagaagaagaagaagacagtttgataagttcagctgatcaagcaagtgtcttgaaccaagaaacatggaatacacaaaacagagtttatgggatttgtcttcagccttttccaccacccttgcgaggcggggttcctcgccttcctgcatttttgccaaacccgaagtttcctttcttctcagatgctttaaggatctgaaatgagcacgtcaaggaatcatccacactcatcattgctcctgcgttatcaaactctccgcagtagtttgggnnngagaatatcgttactagctgtctatttgcaaagaattcatacccgtcttccacaacctgatgagctctacaaattaagtcaaggtcatgcg

SEQ ID NO: 141 - DNA, 583 bp, Arabidopsis thaliana
gcccttttttttttttttttttttaccaaataaaaacttataaatttatatgagaatttattacaatacttcagaaaaagaatctcacaaaactggaatttccaacaaatggaggatttgatattcaccgtatatatacgaatatacatactatatgtattataaaacacatatacacccatatgaattagaacaacaaaaataatcaaatcaaagagaggatcgatcatacacactgttttattctattttgtaaaatttggtagcaaaactccaaaatcaatagagtgagttataagtacaacaagtagcaacgatggagccaatgcagatgacaagtgatggtagaagagtggcattcaggagatggcctcttcccaaatatcctcccaatgttatggttgcatctgccacaacacgagccaacgttccagcttctgttgagagcaatcctccgttgtacgttcctttcgatagccttgatgacattacccgcgataacaacgatagattcacaccttcgagtacttcagcagcaacaaacattatgagaccagagattacgtattgaggtacagtgtat

SEQ ID NO: 142 - DNA, 583 bp, Arabidopsis thaliana
atcctctagagcggccgcccttttttttttttttttacaccataatgtaattattttcaataaaccaaaatattaaaattttattgtcattgatatctcataactctattatgctaaaaagaagaaaagatagaactgtgacatactttaggtgagtaagagaagcaagacatggttagactagaaactgtcgagaagaagtagaacaaaaaagaggaacttagaccgatcctaaaccgattaacaaaaaccaacaagtatcaaaggaaaatactactaacggagctatcatcatggacacgccaaatggtctcacccagaagattagccaccgataatatcgttaactgcgggaagtaattcttctccgctactggtaaagtattcgtcactatcacttcttgcagcaaaccgcttgataaccgctctatcgcaggaggactgaaaacagcgtgtgtacagcaagcgtaaacctcacgtgcaccctcctcgtgtaaaagagctgctcctttcacaatggttccagctgtatcaataatatcatccaccattactgccaccttccctttaacatcaccgatta

SEQ ID NO: 143 - DNA, 582 bp, Arabidopsis thaliana
accatgggtttagggagctctctaaggaagataaagttgaaatctatgggagcagcctagtacgagattcttttgatgaacccgactacgctctcatagatactctcttttcactggccgaagcctatttgttcgctcaacttgttgactttaaagataataaccctgaaaaagttcccaaggacgttgattatgctcggatgtataaagatgttcgtgctgctgttgatttgtgccaccgtgacggaactttaaagcagatggtggcaaaagaacctaataggtatatcaatgaggataccacgatagtaccccttattaaaatgatcagagattctggacgttctacattcttagtaaccaatagtttgtgggactacacaaatattgtaatgaactttctctgcggagggcgcacagtacatggtccgcatacttgcaactttgattggctccagtattttgatgttgtgatcactggcagtgcaaaacctgggttcttccatgaagatagccgtgctaacctttttgaggtggaacctcagtctggaatgcttattaatactgacaatggaacaccta

SEQ ID NO: 144 - DNA, 582 bp, Arabidopsis thaliana
tttttgtatacaactttcttcaatgcaaaaaagggatacaaatattcgactaatacatgtaagaaacaatcaattggatcgtaaaaggaacaactgtcgactatattaacccacactcttcttcgtttccttgatctcaagctattgccgactgaatggtctcggcctctgtaggacgccaccatgacttctgaacagagagcaatccttctccatctttggaatgtgtcattcttacattccatttcatcgatttcaccatcttctcaatttctcctatcgtttccatgtcatctcttactatgaaagttccttgtggtctaagaatccggtctacttcagccatcacgcccaccaagttgcacctctttttcagtgaagagaaaagatgatcagcgtgaaggaggtcgtaagtccgagggtaagtgctgaatgattcacaccaatcatgatagattccaaacaaaccacgttcgtatataatcggaagggtatcaggtgagtcgataggaactacattcatcacccacagtttcagatccttcaatgcagcagcaaaacctccatagactgctctcatgt

SEQ ID NO: 145 - DNA, 582 bp, Arabidopsis thaliana
ctttttttttttttttttagaacataagaagatcaagaacatcaaataaaacagactgctacagtcactctcatatgccaaaaagccaaattgtgtcaaaataccaacaaaaaagacaagaagaaaatgcaacttcaactacaaccaatctcgcaggattcgaacagacaagaaacatgggttctctgctttaatctaattgttatctttctcaaaaaaagaccattccttaacgaccttcatgcatcaaaggcggataaagcctagcgtgcaccagcagtgagttttagttactgtctgaaaccgccattttccactaaccctatatgcttcaaagaaccctccagaatttgcattttttgagaatatgaaagaggtgtgaccgctcaaaattggcctcttggtggcctagcctcagcctctgagactcttatttgtcttccatccaaatctgctccattcaaggaattgatcgccttctgaacctcttgggaagagctaagtgtcacaaatccaaaacccttggatctaccgctgtccctgtcgtagataaccctagcttcaactacctttccttgctcg

SEQ ID NO: 146 - DNA, 582 bp, Arabidopsis thaliana
ttttttttttttttttactttgaacacacttcttttattaaatcggatcacaaaaatccatcaaagacacaacagcaacaaacacaaagagaagacttaaaacactgaagcagtaaacaaacagagagaaataaagtagaatcagcttattcaaagtgtgtaaactatcatcaaaagatacttaaaatctccataattatttggttattggcgcgacatggactccaaatttgtgaagtagatcaccagctcttccatggaaaccaactatcttttgaccgtccttcttgaattcgaaggctgtgccagctcctattccaaaaggaatagatactcgcttattagtcgtgaacctaagcatatttacgattggttcattcccaaagattgcatcgtaggtgccatcaactgccgtgatgtattcacttggatagtcaagctcaaactcttcaaatccaagcaatgtgggttttccatgttcttttccttctacaacctgacctgctttgtcgtacacaaacgagaccgctccaataccatcttgggcttgtcctacagacactttccttacaccgtcgaaag

SEQ ID NO: 147 - DNA, 582 bp, Arabidopsis thaliana
  misc_feature (1)...(582): n = A,T,C or G
ccacgcgtccgcaagaacgttcagccgtttgttgctggttatcgatttggctctgttggtgttgctcacaatggcaatttagtgaattacacgaaattgagagctgatttagaggaaaatggttcgattttcaatactagctctgatactgaggttgtgcttcatttgattgccatttctaaagctagaccctttttcatgagaattgttgatgcttgtgagaagcttcaaggtgcttattcgatggtgtttgtgactgaggataagcttgttgctgttcgtgacccacatgggtttaggcctttagttatgggtaggagaagtaatggagctgttgtgtttgcttctgagacttgtgctcttgatttgattgaagctacttatgagagagaggtttatcctggtgaggttttagttgtggataaagatggtgtcaaatgtcagtgtttgatgcctcatcctgagccaaagcaatgcattttcgaacatatttacttctcgtnnnntaattcgattgtctttggtcggtctgtgtatgagtctaggcatgtctttggtgagattttagctactgagtcacct

SEQ ID NO: 148 - DNA, 581 bp, Arabidopsis thaliana
  misc_feature (1)...(581): n = A,T,C or G
ttttttttttttttttttaaatatagcagatttcatttatatataaaaaaagggctgacacaacatgttaaattcaaaagattgaacacatggagtgaggaagagaagctgtttttgatatttgcacacaatgataaaacttcagatgatcaatcggacaacatcatcatcatcaccataccatccacacagaccattttttgatgaattaaaaaaaaaaaagcgttgagaacgacaatgaaggacccccagatacatactttggtattagaaggggcaatgattttctagcaaaccagaagaagattccagaagtaactagaagcaagtaccttccggagnntgaacaagcttacggttatgcgacgtagacatttccttcttcaactgtaccagtatatcctccattgtgtactctctttgccagtttgcaagtagcccaaatttcttaggatccaccactcctgtttcgtggttgacacaagccatgttgacacgtgaatggaatcggacagttggaggtttctccgggtaatctttgtcacaaaagagcttcaactgatagattctaccttcatgaa

SEQ ID NO: 149 - DNA, 581 bp, Arabidopsis thaliana
cttttttttttttttttttttaatcaatttattaattaactaatcaatactcataagccaatcataagagaagggcattttttattcagtacaacacaaggcccaacagattcaagaagaaaataaaagcccattattacaatcaaacccacaaccacactgaggactctcttcaaaattagcagccggaaaactcgccgacgcgattccgacggagaagtcgagatcggcgccgtcaagagacacttcagcaatattaacccagaagaaaagaaccttaacactaactcctttcagattcttgacatgaccgggtgatataacgccggagatagttgatttgtacttgagctggtaggattggatggtgaattcacacgtgtcattgaagtagactttgaagttgcctgtttttgggttaagctcatagtcaaccactccttttgggaggattcctggtggtaagttatagagtttgacggcgtcgtaagcggttggcttttggccggagacggcgaaagagacagtgaagaatagaaagaagacgatagaacaagtattcgcgtctagcgacatggttc

SEQ ID NO: 150 - DNA, 581 bp, Arabidopsis thaliana
taaaacatcatttatttaatcaaccaataaaaataattttgcattgaaaatttaaaacatcatttatttaaaaaccaaaatgaaagctttaaacatcatttataaaaagattggaaggagtatatttttatttggacaaagaagataatgcttatggaatgtctcttacttcaaatgcaaacctcggtagtacctgtaagatacttttttaaataagtgacttggctgcttcaaccatagcttcaatggtgataccaaactctttataaagctttcctgctggtgcacttgctccaaacgtatcaattccaatcgatttcccttttcctccgacgatctttccccatccaaaagtcgatccagcttcgatactaactctagctgatacatcagatggcaaaacactttccttgtatgcatctgattgctcgtcgaaaagctcccaacatacaaaggaaacaactctcacacttttgccttgttcccttaacttctctgcagcttgagcagcaatctctagctctgatccagttccgatcaagatcacatcgggtttgttaccggttgagttgtcagaaatg

SEQ ID NO: 151 - DNA, 581 bp, Arabidopsis thaliana
  misc_feature (1)...(581): n = A,T,C or G
ttcttctcaatttaggtcatcagatctcacaatcaatcgactcgaactcaaatctcacttcatcaatcaaatcatgactcttggctcaggatcgagtgttgtcgttccgaggaatttccggttgctggaggagcttgaacgtggagagaaaggtattggagatggaactgtgagctatggaatggatgatggagatgacatttatatgcgctcttggactggcactatcatcggtcctcacaacactgtacatgagggtcggatttatcagttgaagctcttctgtgacaaagattaccctgagaaacctccgactgttcggttccattcgcgtatcaacatgacttgtgtcaaccatgataccggcgtggtggattcaaagaagtttggggttcttgcaaactggcaaagacagtacacaatggaggacatactgactcaattgaagaaggagatggctgcatcgcataaccggaagcttgttcaacctcccgaannnnnnnnnttctaatactctcaaagcctacctttgaggggcttctccattgttggtcttcaagcttttctttcgtaccttaaag

SEQ ID NO: 152 - DNA, 581 bp, Arabidopsis thaliana
  misc_feature (1)...(581): n = A,T,C or G
tttttttttacaatttgatggttttatgtgtgcagtgatctgctgtgcggtgtctcgtaagccagcgacctcactccgatcatacatccaacactccacaacaaatgagaagtgccaaacaacaatcgagaacaaagccaaccaggactccactcagccactcacccagcccacaacacacacacgacagagaggaagagaggaagagaggagatagtgacccatacaagaacattgaccagccaaagaattagttacaaagaaccccaccaccccacacctccagaacagacaccacaacccccatcaacaccagccaaccctcagcagccagtcacccagccaccaccggccggccagcgccagtcgacgtcatcgcccctgtcccttcagtgccgaagtgaaggcttacgactctgcggcctcagcctctgcgttctcctcctgctcgtcctcgaactcctcgtcctctgcggtggcgtcctggtactgctggtactcggagacgaggtcgttcatgttggactccgnctcagtgaactccatctcgtccatcccttctccggtgtaccagtgcaaga

SEQ ID NO: 153 - DNA, 581 bp, Arabidopsis thaliana
tatagacaatgaagttgagatcaaggtaacaagataattttatttaatgttacataggttacatgaaaagaaagatcccaccagaccaaaaagaaaacgaatcatctctatgctaaagagagtaaaatgataacttaattctaagagaaaaacactgattaagcctaaaacactagcgaggtaatgttattattacctacttctactgcatccaaaattttgctgattgaattaaagcactatgccctactgtcacaacataagtacacaaacgaatttggatgccattacgagctaatcctataatccatcccaagaaagcttgcgagttaccagtaatcttaaaacccaaaatcgcattgagcagatgcccatcagggtaatatgtacctcacaagaagaaaagtaactaggtccaagctgatgatcatctcgacattaatagacctgtcaaatgctgtccatctgaagagccaaaagtatcttccatgaacttacagttctcacaatccaaagatctttcactagagaaaccatcattcaagctaggatcgtgtggacagcaactgacaactcgattc

SEQ ID NO: 154 - DNA, 581 bp, Arabidopsis thaliana
  misc_feature (1)...(581): n = A,T,C or G
ttctttctgctacaagtagataaaaaatggcatggcgcagtgcagcacgctctttcgtctccgctacagctagagctccgtctctccgatctccgccgccaacgcttccccgcctccgtccttcccaatcctctttgccccgccgccgatttgcctctttcactaatcccaggaatttgggagagctaggatgcacagagtcattcttgcctctgtacaatgttgtggctgcagcgagactcacatctcaccttaatgttaatctgcgagctttctgcgaactctctaacggtacttgaatgcacaaagtggatgcatcagttatcttgaagcagttggagacttgagaaaaggggtgtaccaagaagaactcattggttnnnnnntgttccattaggaaccaaaaactatatacattattatcgatcttccttcgcttttgtcaatttccagttttagaatatcactggatttctcttcatatttcttgttgtttannncaatggctttaaatacttgagggtagattcagcaaattcttgaagaaccattgtttcatcgttgtatttataatgttatga

SEQ ID NO: 155 - DNA, 581 bp, Arabidopsis thaliana
ctttttttttttttttttttttttttttttggttaaaagtacatgtagtaactaaatgattttgacatggccgacacaaaaaaaaaaacaatgataatgacaggtggtagcgaagatgaatggtcaagcgaagaagctctgggctaaaaatgaacgatacacagtccattacagggcctaatttcgtatagcgaaggaaggcccaaatgtaaaagagggcccaaaatcagaggggaagaagaaaatgtcgatgagcagcgtagtcaacgaaggtgtagagaggaacaagtgtgtctcctcctccatacttgttgtcaaacacttgaagctccttcttcgccttctccttgagctcttccgccatttccatcattcccttctctgctccaccatcatagctcttcttcttgtcctcggtgatgtcatcgaccacctgatacagcatcccgacggctctcccgtaccttcggagactctggagctcatcctcagtggcaccgcccaataggccaccgcacacggcagagcattcacccatggctccgaatttcttctcctgaacaaaggaaagaggaaaggga

SEQ ID NO: 156 - DNA, 581 bp, Arabidopsis thaliana
ccacgcgtccgtgaagtgttcaaactcctttagcgagttgtgtaaagaacctccacctctaacagaggctctcagctcctccttcaaagtgacggctctctttctcatttcctctccttcttcgaaaaccgttaacctcttcacagctctctcgaccgctcctctttctagatcaccctccacttgaatcccaattttccaaacacactccaagtaccttgcgttcacccgaaaatggcctgcaaatcaccggaactccttcgctgatcatgttttctagtatcgagttgcatcctttatggctccaaaacgcccctattgcaggatgagcaagtacttccttctgtggagcccttttcacaatgtagttgatacatatgttttctacttgtttatagggcggaagctactgttactaagaaacctgcttttcctccatttccaaaacctacaagaaaactaataagtagctctctaagctccgggcttatagattactctgcttctcatcttctttgaacgttttatatatataaatatcagattctcgcttgtggacactaaaaaaaaaaaaaaaaaaa

SEQ ID NO: 157 - DNA, 581 bp, Arabidopsis thaliana
cttttttttttttttttttttaacccaaaactgaaagtgatttttattagattaagaattatagaaaagtatctgagttctgtctgaactaatacatcatagtctagataaataatcttcacctctaccatcgaagacaagtgggataaaactctcgcctaaaaacaagcaatgccataaggcccataacccttattttgattaatctgtgaggtgaaacaatagcagcaactacatatgtatcatttagctctgtgagagctcgcggcttcgtttagctgcagcaacaactgcattcataagtgttgcccggaaagagcctttctctagttcatgaactccggctattgtagtgccgccaggtgaggtaacatcatctttcaacacacctggatgcttcccagttttgctaaccatcgttgcagctccaagaacggtctgtgaagctaaactcaatgcaagctctcggggtaaaccagcagctactcctccatcggctaaagcttcaattgctaaaaatatgtatgctggtccacttccactgagaccagtgacagcatcaaacattttctcatcagctt

SEQ ID NO: 158 - DNA, 581 bp, Arabidopsis thaliana
  misc_feature (1)...(581): n = A,T,C or G
agacatctagagatttcaatcctttgcaaatcttacaaagaagatcaataccaagatcagagatctccatacaccatttcaagctaatcttattcagattactacatccaacaacaatcctcgctaatccaacatcgcttaaactcaaacacttatccatcttcagctctctcagccccgtcgcannnnnnaacgccgccgcttctctatcaccgaatccccagcaatgagacacgtcgacgcgctctaaagcgtgacacatacgcgccaacgtctcaagtcctctagctcgaactgcggtggaacggcttaagttcagtgacttaatgcctaacgttgaaacggtgccgtctaatgctaaacgtaaaacgacgtcgtcgtcgagttttggacagacggagaggtcgagggaagagaggtttgggtatttgaagagaagcgtcgggagaaattcgacccggaggattcggatcgtggtacgagtcaatgagtcgactcggaggaagtctttgctgattaaacgccatgttttccgacacggttggtctagacattcgtagactcggacaagaagatcttcc

SEQ ID NO: 159 - DNA, 580 bp, Arabidopsis thaliana
tttttgagaaaaaccaagttcggttacatatactccgctctcaaaagaaagagcgtaatttccctttgtacaatatttaatttatcagcagacatatgaattctttaagctaagttctaaaccattactctgccttgtgatccttcatcttcatgtcggtcgggtttaagttgttttcccataactcctacatatgacgttgaagcctctcatcttctgtatcaaagttaagattttgttcctatgaagatgaacccacctggagtttcgccaattgttcttgtcgccggcccaagaagaacgctgtgactatccatattaaacacacctgttaaaaaaacaatggagacttgatgaggagtttcatggagaaataatactcatacacgacgaactgtctgaaagtaggaagcttttattatactggcagggcatagagtgaagcagttgacgtttgaccgccaagagcaatggtaaggacttcaaatagtcccgccgctgcagcatctccaagccgttgaacaattacatctatgcataccttagctttgtatttctcgtcttgcgagacaacggtgaa

SEQ ID NO: 160 - DNA, 580 bp, Arabidopsis thaliana
acataacgcagatgtgaatgtcatctcatggaacaggctggctagttgcatgttggcctcaggaagtgatgacgggacattctccatccgtgatcttagactgatcaaaggtggagatgctgtggtagcacattttgagtaccataagcatcctattacgtcaattgaatggagcgctcatgaagcttcgacacttgcagtcacttccggtgataaccagctcacgatatgggatctatccttagagaaggatgaagaagaagaggcagagttcaatgcacagaccaaggaactagtcaacacacctcaagacttgcctcctcagcttctctttgttcaccaaggacaaaaagatctgaaggaacttcactggcacaaccagattccggggatgatcatctcaactgctggtgatggtttcaacatcttaatgccttacaacattcagaacacgcttccgtctgagctaccagcctgaaagacaaggtcttactctgaaaactcttgaagtattactcatagttttgtgttgtcctctctctgttctctttccttgtatcattgatggcaagttgcaaga

SEQ ID NO: 161 - DNA, 580 bp, Arabidopsis thaliana
acctattataagaaatactctaactgaaactttacttcttcatcaatggcttattctaaggttgcccttctcctcgtcttcaatgtcatcttcttcactttcgtcagctcgacttcggtcccttgtccaccaccaccgcccaagagctaccacaagaagcccgcaacgccatctcttaaacccacttgtaaagacgctcttaaacttaaggtatgtgctaacgtgttggatgtggttaaggtttctctaccaccaacgtccaactgttgcgctcttatcaaaggtctagttgatcttgaagccgcggtctgtctttgcactgccctaaaggctaatgttcttggtatcaaccttaatgttcccatttctttgaacgttgtcctaaaccattgtggtaagaaggttccatctggtttcaaatgtgcctagagattacacattttaaattgaggttctatataccatatttcattcttgtttttcaaattccgcgtttgatgatatctttatctattgttgtaatttgttatatgtttcatatatcaatgaaataaagtgtttcctttttcgaaaaaaaaaa

SEQ ID NO: 162 - DNA, 580 bp, Arabidopsis thaliana
ctttttttttttttttttttttttaaaaaaatacaaatgtaaattaattattcaaacttgcataattaacagaacaaaaatctaattgttatgccataatgcaagcaaagtttgatcggaatgatgacccaataatatatttcttagtcaacgaaccataaaatacaggatccaattaatgaacggctctcgttcgtcctcaagcttcaaatctgtattttaaaatatcaacggccaggattcataaatccctcggtggcgcgcagagacagtcagtggccattttcggcgacggaagtaggctccgccggctgctgctgcgttatacaatgaatgtttcctccagcaagaacgatctctcttgcattctcgattcccacaaccgagtgatgaggaaatgtatccgagaggacacgaatcgcttctttatcacgtattggatcaccgaattgtggagcgattattcctccattggcgatgtagaaattcacatacgatgctgcgagtcttgtccctgcaagtcttggtatagcttcaccatcctgagtgattccagacgattcttcttcagtcatataaa

SEQ ID NO: 163 - DNA, 580 bp, Arabidopsis thaliana
  misc_feature (1)...(580): n = A,T,C or G
ccacgcgtccgtctgcctctttctcagatcacaaaaccctaatttcgaatctttattcttcagaatggctttctgtaacaaactcggtggtctattgagacaaaacatttcttctaacggaaatgttccggttacgtctatgctcggatctctccggttgatgtctaccaagcttttcatcggaggtctctcatggggaaccgatgacgcatccttaagggatgcttttgctcacttcggtgacgttgttgatgctaaagttatcgttgatagagagacaggaagatcaagggggtttggatttgtcaacttcaatgatgagggcgctgcaactgctgccatatcagagatggacggaaaggaactgaatggtcgtcacatccgagtgaatcctgctaatgatagaccaagtgctccacgggcttatggaggcggtggtggatacagcggaggaggtggtggtggctatggaggaggnnntggcannnacggtgnnggtgatggtggtggttactaaacagaggatgtggttgtgaagaagagttaatggttctgtttagttggtttcttctattgaatc

SEQ ID NO: 164 - DNA, 580 bp, Arabidopsis thaliana
gttgcaaccttcggggttctcctcgtccttaacggctgccttgcgaggcagtcacttggggttcctcctcagctacagaacgagtgtaacctcgacaacctagatgttctccaagccaccgaaactatcaagagtgaagccggtcagatcgagtactgggaccacaaccaccctcagctccgatgtgttggtgtttccgttgctcgttatgtaattgaacaaggcggtctttacttgcccaccttcttcacttccccaaaaatttcctacgtcgttcaaggaacgggtatcagcggaagagtggtccctggatgtgccgagaccttcatggactcgcagccgatgcaaggacaacaacaaggccaaccatggcaaggacgacagggacaacaaggccaaccatgggaaggacagggacaacagggacaacaaggaagacaaggccaaccatgggaaggacagggacaacagggacaacaaggacgacagggacaacaaggccaaccatgggaaggacagggacagcagggacaacaagggttccgtgacatgcaccagaaggtggaacatgtgagacgcg

SEQ ID NO: 165 - DNA, 580 bp, Arabidopsis thaliana
atggctttggtcttgcacacgtacaagggaaacaaaagtgctgagaaggcactcattgcagcagagtacgttggtgtgcagatcgatgtgccctctgactttcagatgggtgtcactaacaaaacccctgcgttcctcaagatgaaccctattggaaaggttcctgtacttgagactcccgagggttcagtatttgaaagcaacgcaattgcccgttatgtaagccgattgaatggtgacaactctttgaacggatcctccctgatcgaatatgcacaaattgagcaatggattgatttctcttcattggagatctatgcaagtatcttgaggtggttcggcccaagaatgggctttatgccatacagtgctccggctgaagaaggtgcgatctctacgttgaagagagcacttgatgctctgaacacacatctcacgtctaacacttaccttgtcgaacactctattacccttgctgatatcatcactgtctgcaacttgaacttgggatttgctactgtcatgaccaagaaatttacctctgaatttcctcatgttgagaggtacctcggccgcgacc

SEQ ID NO: 166 - DNA, 580 bp, Arabidopsis thaliana
ccacgcgtccgaagctctcgagcttgagaaacttaccgatgaggagatcaaagacgctgtcatgaccactatctcttgcttgacaggcaaggaagttaagaatgataccgcaaagcccttgaccaatggctcattgaatgatgatgatgaagccatgaagattacaaaggtcttgaagagcaaatggggaagtgatcctctgttcagaggctcctattcgtatgtagcggttggatcaagcggggatgacctagacgcaatggctgagccattgccaaagattaataagaaggttggtcaggtcaatggtcatgatcaagccaaggttcatgagcttcaagtcatgtttgcaggggaagcaacacatagaacccattactccacaactcatggtgcctactatagtggtttaagggaagccaataggcttctcaagcattacaaatgtaatttttgagtgttaatttttaaaatatgttctgttttttttttttggggtaatgtgtttagagaagcataattagttttgtaagattttttaattgtttaacttcaattttttttttaaaaaaaaaaaaaa

SEQ ID NO: 167 - DNA, 580 bp, Arabidopsis thaliana
tgtaggctcgtagtgctaaaatcgaaaagggaatgatccatcatccaagagtgaatacatttaacagaaacagagacaatctgtaatggtaaaagataattagaattcaaacccccaaaacgtataacaatcgtcgtttacgacagtagaatcgcatatttacccaccaaaaccctattgtcttgttgtatagaaacaaaccagaatcaaaactgtaagcaccttcatatattagcaatccatagcataagattacctgaatgagtactcgcatccacaaacacacatgcacacacaaaatctcttctctgtagcaccaacacgactaagccttcttcttagctcactggatcttcctcagctcggtgtcccggtctcagtaattgcagcttcctcttttatttctggagtggggctacttccacgttcactactcgagctgctgctattaaccacttcgctggtctcaatcagtggcagagagtctgtgattggtgaagcggaaatagcaggaagaagtacattctcctctgaatgcttcggtttgttcagagcattacagtgagggcaatagtatgta

SEQ ID NO: 168 - DNA, 580 bp, Arabidopsis thaliana
cggccgcgaaaaattaaggttgttcttgaaatatgatcaaagaaatggacactgatgatatacacatatagtgtgcaaaggctgttcacgatactcttagtttcattcaggtccaataatattagaacgtaaaaatgcaataaaaaaaagctttacttatataatggttttgaggaaccaactccctatactcgtgaagattattactcttccttgaatctcttctccgttgcctccaagcgctccaggtctttgttgtatttgcagatgcggtagatgcaccagtagagtagaattcctgcagcgcatagaaccacgttcctctgagccttgtagatagatttctcgtagcgatcacgttctgtagcagtgcaaacctcagatgaacaagatagtctatgctcagccttccagtaaatatcgaggagctgaaatccggcgaaggcgacgatggaagcagcaggttggagaatcaatgagacaagctgaactacacgtttcttaagaagcatagggtaagggagagtcaacacgagggtgattactacttcgacggccaccacatacgataggcggccgc

SEQ ID NO: 169 - DNA, 580 bp, Arabidopsis thaliana
cttttttttttttttttttaataataagcaattaacaaaaagtttgcttgaaagagaagctgatcaatgtcaaaggtttttacagcagaaagttggaaataaattggacaaacaaagaaagatccaaccgaagaaggaaataacaactctctcttggtgtgtagagcaaaaaacgagtctaacatgttttaaaatctttcataaaaacttataaaagatgagcaatcttcaaaagaagaagagacaggtttgggctaaagaagagtgctgtgatgttgaaaatccagagataacctttttcattcattcccatggagattgagaccaaaaaaattattattactcaacgctgtgttggcctgggcctggagcttccaaatgtggatcggcgatcatcactgcctctaggaccagaaccccaacggtctcctccttcagctggaggtccagatctttccctattactagtccaccggtcagtattctgagcggctcctctgttgcttccccagtggtcatctcctggaggcggcccacggttggaccgtcggtcagtttctgatgatgttggtgctgatgg

SEQ ID NO: 170 - DNA, 580 bp, Arabidopsis thaliana
ttttttttgatgaaagaaaattttcgattaaaaaaaaccatccctatcgagaaaaatacaaaaacaaattacaacaaagcaacacaagaaaaataaagttacacaatcttcttcttatcttcttcttaatcatcatcatcgtcagcttccaggttgaaagcttttcttatttatgtttctcaagtaaatctccttctcctaggcggacgagaatctgcactgtctacatcagaaaccctcgaaccattctcattccttctcctcgaggacgatgtcgaaagagccatagaatcgatctcaactgcagtatccacttgactctcagagtttataacagctgcaatgcttgagaatgagtctctatcatcaaccacaacaggagcatgatggttttgctcttggtggttcctccccaacggatgagtcctaaaatacgcatccacaagcctctcagctgaactcaacgcagaagtgaaagtcgagatccttgcaactcggtgcgactgtaactgtctcctgatcaagagaggatggaatctcgtgttgctttctccttcaagatcaggagcaatgtttggat

SEQ ID NO: 171 - DNA, 580 bp, Arabidopsis thaliana
ttttgtaggaagatatatattctttttgacccaatagaaaacagagatgcagattttgtaatgataaccaatcatgtgttttcttttctttggcccttataagagaggacaagatatacaaagagcaaccaacacccacaaacatggggttgattgacaataataaaacatcgatcgctgaaaatcagtttttgtccattgttacttgctctggttcttttccctctataatgttcctcaaattgtgaaatcggatttatttcgaaaagctttatgttaatagcactgttgggggagtacctgcagggcacctatgtcgccttggtcttctggttgcatttccccaccctgtaaggctcctatcttccagtcccaccatttgtacactactgttattcattggctgtgccaaagaggagcaaaccggagctctgtcaatgttgctgaccagtcgttttcttcctcggtttgagctccttcgggccattcctgagttccagttgtagcctgtggctttcataagtcccccaaacatctgaagatcttcggttacttcgagcctagacagagaagctagccc

SEQ ID NO: 172 - DNA, 580 bp, Arabidopsis thaliana
ccacgcgtccggaaaggtaaagagtttgaagaagtaagtcacagagaaagagaagatgtctgagaaaaagggaaggaaagaggaagtgattaccagagagtacaccattaacctccacagacgccttcacaaatgcacctttaagaagaaggcaccgaaagccatcaaggaaatcaggaagttcgcagagaaagctatggggactaaggacgttagggtagacgtgaaattgaacaagcaaatctggagcaagggaatcagaggtccaccaaggaggatcagggttcgtgttgcacgtaagagaaacgacgatgaagatgcgaaggaagagttcttctcccttgtcactgttgctgaaatccctgcagaaggactcagtggtcttggcacaaaggtcatcgaagaggaggattaagagaatcagtagaacaagttttgtttggttttttacttttgttgctgtgtttcaattaaaagtcttgacctttcactttcttcattgtagtgcatcttgaatttacttatgcagtttattgaagagacccattttcttcttcatgaaaaaaaaaaaaaaaaaaaa

SEQ ID NO: 173 - DNA, 580 bp, Arabidopsis thaliana
ctttttttttttttttagtagaaacgatcaattgtattaatgttgcattgaaaacgaaaaatagtactaaaattccgccatatgacgatcgtacattaactattacattgctacatataaataagggcatcgccagtttttaaactgcgaaattattcaaagcgagaagaagaagaagacgaagaagaaggacgaagcaagtctaatgtgattaaccatatcgagtatcaagcaaagaaaactcttcagagcctagcggtacgaagttgctgctgaagcacaggtcgaaggtattcttggtacccatcaggaaccaccgagtcgttcaatggatccttcaacgcttcctcaaagagctttgggtacacattaccgtcgtaacggccaagaaccgagttcaagtaatggtcggtgtaattgaaggcgtccacaagtgcaaccgcattaggccggacctgagtgtataaggaacggagctggtcgttagcaagagaggcttgtttgggagtgatgcagttagtggagaggaaatcgccgagatgtttgtggaggagataaagagcataaatgtaacacagat

SEQ ID NO: 174 - DNA, 580 bp, Arabidopsis thaliana
acaattaaaccatccctcaatagtataaaaccatctcaaaatatctgaattaaaaaaaaaacaatctaaattccaaaagcaaaaagacataacctactcttcatcagccttcttgaacacgtaagtagttccacatttcccacaataatgcctatcgaaatgactcgccatgaaagttccaggaccacaactaacagaaggacactctttcttcaacctctgaactttcccacttccatcaaccttgtaaaactgcagaactgctagcttcactttcttgtgcgtatgcttaatcttcttaggtttcgtgtacgtcttcttcttcctcttcttcgcacctcctctcagacgtagaaccaaatgaagcgtcgactctttctggatgttgtaatcagctagtgttcttccatcttccaattgttttccggcgaagatcaaccgttgctgatccggtgggattccttccttgtcttggatcttcgctttcacattgtcgattgtgtctgatgattctacctctaaggttattgtcttccccgttagggttttcacgaagatctgcattttctcggacgcgtgg

SEQ ID NO: 175 - DNA, 579 bp, Arabidopsis thaliana
  misc_feature (1)...(579): n = A,T,C or G
aactgccaaaaacatattcaactctcgttattcttgtgtcttttcacatgaaagaggtttcatatcaaaagtgctctcatttacaagagaagtgaaaaacagaagaagacgcatcaaagtaagtcttttaagttttttcacagatcctctggaccgttgatgtccttattctcgagcacggcattgtcagggatttcaagtttagtcccggcgtttgcctttactgtcactttgcccttgagaacaacgccggagccaaaccaaacatcacctgagaccttaagactatcgagctcaactatactcgggatggacttgaaccggctaaggaaactcgctacctttttgaattcgggtcccaactcgatcgctgggtttgtggggtttgttctagctttgtnnnttgtgacaaagccatctacgagtgtgtacagatccgattgaacaagaagcaagtctgaagttgnnttcactggcnagaaccgtgaccgaggtacattcacacnnnttgcattatcaaaaaaccttatcgcagcaccagctgcagtttccagctgaagaactttgactccgtcaact

SEQ ID NO: 176 - DNA, 579 bp, Arabidopsis thaliana
gttaagtcacaaagatgttcaagacaaatgataaagatccattacatcaggaagataaaaccaaaagatttaggaaaatagaacagatatgtgtttatctatctctgtcaaatccgccacacttcaagatttacaatcacccacagaacctgcctaaactacgtacaaagctagctttctatcttctgagttgttctataacttcggcgctttgttgggttccttagacgccattataagctctaccagggacccgtcaatgtccttcgcaagcattgccttttgcatcccattccccatggctggcgcagaggctccagaagctgcaacaacaaatgagccaacttccgttaaatccatgctcgtcagattagtctcatgaaatatccaaattggcattgcaacatattcacaaatcttataatactttatgcagagtgggaaatcaaaaatgtgatgatatgtctcacttcatggtatagcttacactattctactcaaaagcttagaatactgtccaaaagtgtaattcattatgagtgagagttaaaagcctagccaacaaccatagaggatatt

SEQ ID NO: 177 - DNA, 579 bp, Arabidopsis thaliana
ctttttttttttttttgacgggaatgctcagaatcagaacatgaacttacaaagtggtcagctcgaggacgaatatataatgttttgctaaagagccagccaatatattggttaaaacttgaaactgaaattagagataaccgatttgatcagacaagaagagaaggagaaagacaaaatacttggatagcagtaattataataacatcgacatcaacagattacaacgcaagtctttcttcattaaccgagcttggcaagaacattgttcaaactcgagacagtttctgagtaatacttctcagcatctgggctactctttgatctcgccgcatagtccaagttgtcaatggtttggaaaagctttgcggtgagatctttaaggctttgcttctcttccttaggcttagcggagataacggtgttgagatcgtaacggaggtacgatcctcttaaacggagatcgttctgaacatagggccaagcttttttgtcgataaatgacttaacgttgatgatctctttagcagaatctttggctctagctgcagcttctgttggtgacaatggttgtatgta

SEQ ID NO: 178 - DNA, 579 bp, Arabidopsis thaliana
ttttcaaactcaaatgataatctctcttttcttttgtatatctttagagagattacacttcttgtcctatattatatatatcatatcatatcatattacatcatcttgtgtggtccatcatcacataacacattaaaactagagaaatggtacaacaatcttccttctttctcttctcctatctcttacatcaaatttcctgctttttattttttacacctctgcatctttttggttattaagggtctctctattttatcagttttttttcttttcttacttcacttcctgtttatatcccaacacgacaggttggtccacccctaccgggtaacattccaatcgccggtaaccttggcatttggtagttgaaagagttgaaggagtcggagagtgtagaaggagtagaattatcatcattatcagaagaaggcgaccacagatccgatccgttattgtcagcagaatcagcaaacagaagcaaatgatgagcgggcgatgcaaacggactatctggcaagctatcctccaacctctctggtagattcattgtatcatcatcagatccttctttagaac

SEQ ID NO: 179 - DNA, 579 bp, Arabidopsis thaliana
tcgagcggccgcccgggcaggtctccaagaaaacactgaagaagaaatggggttccttaagccaaccatggcgattctttttctagcgatggtcgccgtttcatcagccgtggacatgtcaatcatctcctacgacgagaaacatggcgtctccaccaccggtggccgtagcgaagccgaggttatgagtatctacgaggcatggttggtgaaacacggcaaggctcagagccagaactctcttgttgagaaagatcgacggttcgagatctttaaagacaatcttcgtttcgtcgatgaacataacgagaagaatcttagttatagattgggtttgactcgttttgcggatcttactaacgatgagtatagatccaagtatcttggagctaagatggagaagaaaggtgagagaaggactagcctacggtacgaggctcgtgtcggtgatgagctaccggagtctattgactggaggaagaaaggagccgtggctgaggtcaaagatcagggtggttgcgggagttgttgggcgttttcaaccattggagcagtggagggaataaaccagatcgtaac

SEQ ID NO: 180 - DNA, 579 bp, Arabidopsis thaliana
ccacgcgtccgaggattcaagggtttcgctgtacctaaagaagcacagagtaaggctgtagagttcaattttaacgggaccacagcacagcttagacatggagatgttgttatagcagcaatcaccagttgcacaaatacttcaaaccctagtgtaatgcttggcgctgccttagttgcaaaaaaggcctgcgacctaggactggaggttaagccatggatcaaaactagtcttgctccaggctctggagttgtaacaaagtacttggcaaagagtggcttgcagaagtacttgaatcagctcggcttcagtatcgttggttatgggtgcaccacatgcattggaaactcgggggatatccatgaagctgtggcttcagcaatagttgataatgacttggtggcatccgctgtgttgtctgggaacagaaattttgagggacgtgttcacccgttaacaagagctaactatctagcttccccaccgcttgttgtagcctatgctctggctggaactgttgacattgattttgagacacagcccattggaactgggaaagatggaaaacagatatttttc

SEQ ID NO: 181 - DNA, 579 bp, Arabidopsis thaliana
cggccgcataaaaaacatattcttaagaaactcacacaaattattagaaacacttggcattataaataaataaagataatggtaaaatgaaaataattaaaaacgagatttttggagaacaaagagtttcaaacaattcttgaaaagaaaacgataaacgtttagtccaaatctcaaaaaacatttgtttgcagatcttctagctcaggatcaacaactttctctccgttttcagcttcaccagaaaatatcggagtctcgagctctggagggttcgtgcatcgaatcagagcccaatttatgcctttgaagaaagaatgttgcttgacttcatttgctccttcaaaacaacctagtcttttcttcggatctcgttgtaacagcctaaaaatcagctgtttcacttgaagacttgcaggaatgctagctggaaacttgagatctttttgaagaacattggtgaaagtcttctgtcttgtttttcctctaaaaggagtgtatccgtataacatttcatacataagtataccaagagcccaccagtctactgcactcgtatgtcctgctccggatataatt

SEQ ID NO: 182 - DNA, 579 bp, Arabidopsis thaliana
ttttttttaaacaaaaacagaacgaatattattaaagaaattacgaacaaggaaacacaaacataacgtcaaaccataaactgatgacgaaaaagacgataagagaaacacagaaacgacatcaaagatccaaacttaacacaacgaaacaaaacgtcacttcctcctaaacatcttggagttacatactacataggaaccaattaatcatcatgatctgtcttatggagaaccaccgcttgaacttggaacaccaccaccactaggtccaccaccgagtccaccagggaaccccattgcaccacccaaaccaccaagcccaccagccccaccaagaagcggcgtcccactcgggagtgggaaagtcatgccagagccaccacttccaccacctggcatccccatgaatccaccaactccggcaacaccgccaattccaccgccgtagatgaagttcttctggtcctcaagaggggcattaaccatatgaggctcatctttggtaggagcagctcctcctccttggagaggcagagtctgagtttgctgtaaagtgcgagcacttgcgcggacgcgtgg

SEQ ID NO: 183 - DNA, 579 bp, Arabidopsis thaliana
gcggccgcagaaacattacccggaggacacaaaggggaaaaagaaggtcataaagttccaaaagggactgatatcttcatttctgtgtataatctccatagatctccatacttttgggataatccccacgattttgagcctgagaggtttttaagaacaaaggagagcaatggaattgaaggatgggctggctttgatccatctcgtagccccggggcactatatccgaatgagataatagcagactttgcattcttaccatttggtggaggaccaagaaaatgcattggagaccagtttgcactaatggaatcgaccgtcgcactagctatgttgtttcagaaattcgatgtggagctgcgtggaacgccagaatctgttgaactcgtgagcggcgcaacgattcatgccaaaaatgggatgtggtgcaaactaaagagaagatcaaagtgaaatttatggataggcaaaaagactcaattttaacttgaaggaagctgagtgtaaatgagagatgatatgcttatgattcactaaacgtacattcttgagattttgaaaatgcaaaaaaggcggccg

SEQ ID NO: 184 - DNA, 579 bp, Arabidopsis thaliana
aactgattatttgattagacagtgaaaggtatcaataatgaacataagataatttttcctattaataatgaaattacaacaacagaagactacactaaaaggtacaaatacaatgatccgagaaaattacaagtgcaaaagtgatgaacgctctttaatgtgcttcacaatgctctttcaacatagtttgctaaaaacttcactttcgacatatatcctcaaacatcaatgatgtcttttgtaatttcttcatcacacaaccatatacctagttttctttttgcatatccatgaatatgtttagtattacaaaagatataaaatgaatcttatatgtttactaaaacaaagattatcaagatccatcttactcttttgcatatactcgaatacctatatgggattaaagacctatgtttctaccatccgatcaacaagagttacaactttttttacggggataagactgaaacatatatgtatatcccatttctaccatctggaatacttgaactaccatctaaatctattgaacatcgtgtttcaaaatacacaagttcaaactataatcaagtgaat

SEQ ID NO: 185 - DNA, 579 bp, Arabidopsis thaliana
aaatatcttataagttattgtaataataaagcaaaggaacattaaagaaaggaagtaattaaaagaagatgagagaaactagcaaatatattaaaagctcaacacccaaccaactcttctccttccatccattactcttcactggttcggcttttcctcctcctgtcccatctttatgaatttgtgtaggagatgtggagttgtagttgtcttcaatccttcctaagttctcaaactctttagccaatgttgagttacgaggtagatgcagaatcgaaatacagtcagtgatgttaggagccgtgatatgacaagcggagggaagatgagcggctagggttgcgttaatcttgataccaagttgaggatcatctttgtctctgaccaatatgcaaacacacttctcactctttcttataacttggccaaaccctgcacaacaatcttttgttggagccttggcgtctcctccaacgtacggaatacacgtggatagttctatgagctggttcgtacactcctctctgtcctgagcaagatcagagtttccaaaccctagcaacatggaggttatcacga

SEQ ID NO: 186 - DNA, 578 bp, Arabidopsis thaliana
gaaaatgtgtttttgacattacagatttgcgatcacatcattcaaaagttaaagggactaaacataacagacatccaaagtagtcgtttaacgatgcaaaatagataagcagagtaaaacaaagacaagaaagaattatattaaccaggtccgactttagggatatcgtagtgctcactcatgttagccagatactgattgaaatcctcaatcctgttacggtgagacttgttcgcttccttagctagcttctgcacatccaatctttgtttctgctctatgtatcgcctttctgctggcgttaagtgatcatcatcatcgagctgctgctgcaacttcgcatcctcgcttgccttttcactcctgttcatttcttcatctccttcttctccttcaatcaatttacccaatgcttcagtgctttctccttctatgagttcatgatcagtaattttaagagcttgttcttcctgtctcttatgtttcttcttcttctttactccacctgctttcacatccaaagccttcccttttagctttagcttcccaccaataacattgtcgtatgccgacatctc

SEQ ID NO: 187 - DNA, 578 bp, Arabidopsis thaliana
  misc_feature (1)...(578): n = A,T,C or G
ttttttttagctgctattcgtttattttcatttctcaaagaagatttaaaaacaataatgctcacaacagttnnnnncaggaagaaaatacaaaacaaaaaagaactgaaagacgtcataatgaagccacattcccatccatcagattgtcaactgcgtgcagccaaggatcgtcccacgacaccttgtcatcggcgccacactcctccaggccggacgatcattcccaactgtcaaagcgtcgacatctgacaagggcttgatgtcccaattgagcctatcaggtccgatcactcctcctacgatcaaaacctcatcactcaaactcgtcatcgccattccgatcctccgcttaaactctgaggccgatgcaaccatcttccacgtgtcaccttcttgcttgaacaccagcccatggctcatcacgtaaagcacgtcctcaacgaccaccattggaccttgcggccagccatagtctttgacatcccacccgagtttaacgctctcaagaacctgcaccgtggacaagcctttgtgcaagacgtggactttcccgtttaccactagacccgagcagg

SEQ ID NO: 188 - DNA, 578 bp, Arabidopsis thaliana
ccacgcgtccgggccctagcttttttgaagtacttgattctattgaaattccgccacgcgatcctaatggtccattcaggatgccaattattgataagttcaaggacatgggaactgttgttatgggaaaagtagaatctggcagcattcgggagggtgattccttggttgttatgccgaacaaggaacaagtgaaagttgttgctatatattgcgatgaggataaagttaagcgtgcaggaccgggtgagaatttgagagttcgtattactggcattgaagatgaggacatcctttctggttttgttttatccagcattgtaaaccctgtccctgctgttaccgagtttgttgcccaactacaaatccttgagctgcttgacaacgctatttttacagctggttacaaggcaattctccacatccatgcggttgtcgaggagtgtgagattatcgaattgaaaagccaaattgatctcaagacaaggaaaccaatgaaaaagaagttttgtttgtgaagaatggtgctgctgttgtgtgccgcatccaggttacgaattcaatttgtattgaaaaat

SEQ ID NO: 189 - DNA, 578 bp, Arabidopsis thaliana
tttttttttttttttttgaaaactatttatatttttaaaaagtatcaaaagattataatttttgtgggacacaaaagaatcataaataaacgtttataccactccaccgtaaccctaagcaaaccagtggcaaaaccgtaaatccgagattaggcagagaagaagaaaaagacaagaagagggaggagcacggcggcgacgaatgagaattgtgaccgggaaccaccgttgggaagaaaagggtaagagtctggaggaggcatgacgcaattgtctccattaaagtaaatccttcgtggaaaagcccaacctttctcgaatgtgaaggttgattggtctttacggaacaaaatctctgattgaacattcccaagaggacctgcttctgataagaaatcgttgtagaacttcactccccataacatcgccgtatcgtttagtccagcgtaaggagtaagagatttgtagttgaagctgaagatttgagtgatgttgtcgagatttggatgttgagcaacaaggttccattgtgtgtagttcaagcgatagttgaagtttgtgattgtggcggccgcgaa

SEQ ID NO: 190 - DNA, 578 bp, Arabidopsis thaliana
tttaatgtggtaatcatatgatattagaggaataattcggattgatgtcatttgacccaaaagtcgtacgccaatagtacagttggctttgtacgatgcgtatgtatatacattaaaaagggccaaacaaacggaagcccaaaaaaagcccactaggccttagaaagaattcatctctaacacatttctcctacgcttaagcaacgccgtaacagcttctccgtacatacaatcgtcgccatctccggcgaacgcctccgtcaccagctcaacatcgttatcatcggaagccacaccagtcggccttacgaccaccagcgtcgctgcttcgagacaaatcccgctcttcagcatcagcgacggcgcgtgtctcatactcatcctcacgctaggtaccacagttcgttcccccacgcgctctgattctttattatccccacgcacctccgtctctctgtattctttcatccccgccgcgtccatcaccaccgtaccttcaccatcactgtcacgcacaatcaatttctccatctccttgtgatctttcaccaaatctctcatcaagtaatgacgcgtgg

SEQ ID NO: 191 - DNA, 578 bp, Arabidopsis thaliana
gagtccaaacaaaacaagtagaacagttacatttttgacattgtcttttaaaaaaatctcttatcctcttaagaaaaataccccaccaggatctctcagtgtaagtagccaaataaacatacaacaatcaataattcttacataaataaaacaaagctctcttagatctctctttctctctctccacttattcattgctcatgagcttgatggttatatgaagcagccgagattcaaattattggcgaccgagctctctcatgttcctaaaccggaacacgattatatgggatgatgaacaaggattaatgaaaaatgtacctcgtttctttgtcttataatccgttagtagtaatgatttgcctggaaaacctcattgttgagtcttggtccatgttccagacgaagccaggcatgtcaaatcgaggaccagccactgttcggtatatgaagactctctcaacagggcagctctctggtctcgagtccggtgcaccccgttcatcgatgacttccacattcagctttggcatcttctgtcctagtaacttgcaggctccaaaactcacggaacaaga

SEQ ID NO: 192 - DNA, 578 bp, Arabidopsis thaliana
tagatatctataaattccaaatctgaaattgtatcatcttattgataaaaggaaattaagcagcaaatagcagaaagtaattcatgattggaaggataagattaataagattagagagactaagcatctgtgactgcaacagcttctttgacctcagtggttccattgttcttctccgttgcaggcttctcaacttcaggaacaacgaaagcagacactgggaaagtcctggacagaccagttggtgtcctgaaattgatcttccctgaacttgtcggctgctccaagacaagctcattgagagtgacccaaataagaagctccttggccttaacaccggtaagcttcttgatctttccgacctccacctgtgcaatgacctcggtggcgtaagagacaagtttaccaatggcttcaaacttgtgggtgatgctcttcttctgcttcagccagacaatacctgtctctctgtcgtaaccaacttcttcaatgtccttcaatggcaataaaccattaggcatagaaacttccttgagaaactcctttgtcttctcacggcatatctcatctcctgtgta

SEQ ID NO: 193 - DNA, 578 bp, Arabidopsis thaliana
tttttttgtaacttttttcctcttaaaacaatggacaaatatgaatacaaatccatatgtcactattatctatatttacacaatttattcgattttttgtatgttgtcttatctcatcggaaattttcaaactagttaaccatcggaaaaaatcaagacgcacggatatataaattacatattcataaatcagacatttgacaatccgatagaaattgtctcataaagagaaaaagaacacagacaataggaaatgaaatgagcagagataattcataagaatgttttagaaaagaaattaagcttcggtgaagcttgggggcttgtaggcaatgaaactgatgcattggacttgacgggtgttgtcgaatccgatgatcctaatgaaggcgcccgggtactccttcttgcattcttcaacttccttcaacacttgagcggagtcggtgcatccgaacaatggaagcttccacattgtccagtaccgtccatcgtagtatccgggagtgtttccgtgctcacggtacacaaatccgtgctctaactcgaattcaacacaaggaatccacttgttgcgg

SEQ ID NO: 194 - DNA, 578 bp, Arabidopsis thaliana
gagtttcacaagaagaaatgaaatgtatccaattcaagttttcaaccaaacatcaaagaacttattagtatgtgtatgggaaaattatgaagagaacaaaaaaaacacacacagaggatctctagcatttttccagtagaggacaaagagtaaatggtacacttattttaccagcgatgatggtaaattatgaagatacagtaagaaaaactcaaaaataatgaatccatcatcacctcgttctgctctctccgcctacggaatctccccgtgggcgaaccttgcgattcagtgacctttatttcagagccttagtaccggttccagtaggttctgcgtctgaatttgttgtagtctggcaaatcttggattggaccaatagctgagattgcaatgtctttgtcatagatatatttgttggcaacacgttttaccgtgctggcatcaacagcatcgatcctagcaaagagttcagcggttgggattctacgcccataggtcagcagctgacgaccaatatcttcagcaattgggctggttccatccatgtgaagtaacaatgatgatttcagctgatt

SEQ ID NO: 195 - DNA, 578 bp, Arabidopsis thaliana
tttttttttttttttttttaagacttgtaaaatccattagatctcgttcaggtgcatgagaatattgttataaaaatctacaaattttacaaatacaaataaaagagctttaggaacttcaaatagcaccaatgtttttaaggccaaggacaactcctacaccgatgatatgaccaacggtgccacaagccaaagtgtccgcaagcgtgaacccggccgggtcacccgtttgtagacctgagtcacgtgcctccaacctaagtccagctgtcgccttcctattggctgatggcgcaagtccgaatctccccgcgaacaacatcagggtcgtcgacgttaccattatcagatttgttgatgaaccgatgaagtcacactttgcacccaaagctccatttcccttgcgtctcatgggctgaacacttgccaggccttgtacaggagctgcagagattttggtggctcgaagaccattgaactgaggcaatgtagtcatcatagtgctagccattttcttagttgattctacaaatcttttattttcttgtgcgatgttttttttattttcggacgcgtgg

SEQ ID NO: 196 - DNA, 577 bp, Arabidopsis thaliana
caagaaatgtgaaggcggaagagaatgatcaggatcggggtagggatggggatggagtgaataacttatcaagaaactttttgggtaatatcaacataaactcaggcaggaacgaggaatacacatcatggggaggtaacagttcttggaccggtttcacctccaacaactcaacaggccatctctcattctaagtactcagcactagctattcttgatgattcttttgttggttggggtgtacattggtgcttgtcatgcgagttattgctgaggaagatcaaaccatgcagctatatccaaaggctaattttgaggctcaaaggaaaggtatggttataaaactatctttttgatcttttaaaagatcttcaaagtgtgagtatgtttattggttggcttctggtgatatttatgttttattagaatttggtcttatatattggctatatatagaggtgtgggtgatatgtatgaattcaagagttgatgttggaaacttttttgtgtgttcattgaataatcatcgaattctcaatttcttggagacccattatgagacattgagacatctata

SEQ ID NO: 197 - DNA, 577 bp, Arabidopsis thaliana
  misc_feature (1)...(577): n = A,T,C or G
ttttttttttttttttttttttgcttatgtcataacacgcaccatttatttcacaactagttttcacaagatgcttagacaaaacacaaaagcaacaaaagagttgtgtaaaaaagcttgtagactcacggttcatcttcaaaacaaaaatacaataacaacgtcgaaatagcagacaagtacactcagctattaccatatttacatacacaacttgcaccaagtaagtaagtttgatcatacctggaaatacaccaaatgtgattcgttttcaccagatgagaaatatcaccacacagattccaacaaaaaggaggatattcttcagaaatgcatcactttggtttcctcnnngagccatnnnnngctcttgtccacgaggaggaactccacggaaaccgttatgataaccaccgtaaggataacccggtgttgaaccataaagcgtagcatcatgaaatccatgaaactgaaagttaaacaaagaaggtaacaaaccaccaaaccccatactgaaattcccaaacctcgtagtcgccatcatcggcataattccacccatcaaaccaataccgta

SEQ ID NO: 198 - DNA, 577 bp, Arabidopsis thaliana
aacagcagtttcagcaggaagtttctatgcttgcatttttgaagcatcctaacatcgttaggtttattggtgcgtgcattaaaccgatggtgtggtgcatcgtgactgaatatgcaaaaggagggtctgtcagacagtttctgactaagagacaaaaccgagctgtgcctttgaagttagctgttatgcaggcgttggatgttgccaggggtatggcttacgtccatgagcgcaactttatacaccgggatctaaagtcagataacctcctcatatcagctgatcggtccatcaagattgctgattttggtgttgcaagaattgaagttcaaaccgaagggatgacaccagagactggaacttacagatggatggcaccagagatgatccagcacagaccctacactcaaaaagtggacgtgtatagttttggaatcgtgctgtgggagttgattacaggtctgttaccgttccagaacatgacggcggttcaggctgcatttgcagtggtgaacagaggagtccgtccaacagtcccagcagattgtcttcctgtgcttggagagatcatgacacg

SEQ ID NO: 199 - DNA, 577 bp, Arabidopsis thaliana
actcccgcaaaacgtgctaccgcatttgcacttaaaccccattacaccaaccttcttgttacagctgaaacacctgttgttcggtctaacaggtctcgacggctcagcctcgtcctgttccgcggctacaggcaccgaagacggctcggcggttacaacaacggtttccaaatgagctggtttaatttccagaggatgtttttgtccaggtgcaatgatactgcaagatggaagctttaacgagttcttcaccgcagctttcgctaccgcggtttgatcttcctcggctcttaagcttctgtaacatttcgagcagagattcatgttggatggtgacccgaagaatccacatccgttatcacagagcttaggctctgttggtggaaagcttgtgctgttgttttcctctgagcccatttttttgtatctatttcaccttcaacagaaaagtcggatcaaatgagacctttgccacaaaatttcaaaagcttcttccgaatatccttatcaacaagtatcttaaatcttccagaggaagaaggatggggtcagattttttagggatttgttgtaaatt

SEQ ID NO: 200 - DNA, 577 bp, Arabidopsis thaliana
ctttttttttttttttgaggtggtagaatttttatttacttacattgtgaatcctgggaagatcataaaccaggcaacatcttctttgaacaactcaaaacaatgtaaaagatgcgaatagtccaaaccccctcagattgaagataagagacaataggaagtagagagacggagccataaacaaacaaacaaacaaacaaaaaagtattacacctgacaaaagaagttgtgctgtgattaatctttggaccccagataattatctttgttactaagaactcgctccaaagacacggattctctgctgaaccggagctctgcaacaaggacaggtcgctttgccactgcccatgaagctatcgctgcagctcgcacagaccacttggtgagcacaagggagaaacacaaccgaaacctcatctttcatgcagatcagacattcccggtcatagtttgcttccttctcatatgatccatcaagcctattcagctcttcaagcagcttagacattgtttctcccttcgacttgtctgatttcacctttgtgtgagaggtgttattggattggaggcttga

SEQ ID NO: 201 - DNA, 577 bp, Arabidopsis thaliana
ccacgcgtccgactcgatcattcatagctgcgactattctctgctctttctacattttctcattttctcttgggctacttttcgactactaacaaatccaacgatgaggggattggtgaacaagctcgtgtccagatctctctccatctccgggaaatggcagaaccaacagcttcgtcgtctcaacatccacgagtatcagggagctgaattgatggggaaatatggagttaatgtgccgaaaggagtagctgcttcttcgttggaagaagttaaaaaggctattcaagatgttttccctaatgaaagcgagttggttgttaagagccagattttggctggtggaagaggtcttggaacattcaagagtggtcttaagggtggtgttcacattgttaaacgtgatgaggctgaagagattgctggaaagatgctaggacaagtacttgtcaccaagcaaactggtcctcaaggcaaagtagttagcaaggtttacttgtgtgagaaattgtcactcgtcaatgagatgtacttttccattattctggaccgtaaatctgctggaccgttgatcatt

SEQ ID NO: 202 - DNA, 577 bp, Arabidopsis thaliana
ttttttttttttaaggaaatatctacagattgcacactctcaccctcaatgttacagagttaccccctcgggtaaataagaaagagcattgcattggtaacacataaattgcaaatgagaaatgatcaacgatataaacagtttatttaccaagacttacagtaaaatgtacaatgttcaagagtgtccccaacttatgtagtatgtactgtagtccatatgctgaagtcagacatgtcaatccttaaggaaaggaagacgagtacccgtagtccccatgctaccatctgctgatttttggggggatgaagatgtcaacgtcttcttggttgatcggcgaggaagaatctgaaggcgcggattaaggtgagtgccgaggttctcaactgcgagttggtaactctccaccagctctagctgccgaactattatatctgatcgtctaggaagaagctccactggttcacctcccgggattacaatatattcgattgctagacggacttcctcaagggcatcgagttcttctaaactgggtttgctctcaggagcatcatctttgatctcgatatcatcg

SEQ ID NO: 203 - DNA, 577 bp, Arabidopsis thaliana
cattttcgatttggagaaattagatgatgagtttgttcagaaactggtttacgatgctctcgtttggtcttctcttcacggactcgtcgttggtgacaaaagttatcagaaatcaggaaatgttccaggggttggattgatgcacgcacctattgcattgctaccaactgcattcccagaagcttattggaagcaagcttgtaatgttactcctcttttcaatgaattgattgatcgtgttagcttggatggcaaattcttacaggatagtctctctagaacgaagaaagttgatgtctttacatctagacttcttgacattcactccaagatgctagaaagaaataagaaagaggacattcgtttgggtttacaccggtttgattatatgcttgacgaagaaacaaattcacttcttcagattgagatgaatactatctcgtgttcgtttcctggccttagtcgtcttgttagccagctacatcagtcattgcttcgatcttatggggatcagattggcatagactctgaacgtgtacctataaacacatccacaatccaatttgctgatgcattg

SEQ ID NO: 204 - DNA, 577 bp, Arabidopsis thaliana
caaaaatctcagctttgtctctcttattcctcctttttctgctccttccgattcttcatcgcgccacttgtcttcttcttcttcttccgatatgtctgcttctgattcctcttcctctcttcctgttactcttgacaccatcaaccccaaggttatcaaatgtgagtatgctgtccgtggagaaattgtcaacattgctcagaaattgcaagaagatttgaagactaacaaggacgcttatccctttgatgagattatctactgtaatatcgggaatcctcaatctcttggtcaacagcctataacattcttcagagaggttcttgctttatgttcctacacagccctgttggatgagagtgcaacacacggtttgttcagttctgattcgattgagcgtgcttggaagattctggaccaaattcccgggagagcgactggtgcttacagccacagccagggtatcaaggggttacgtgatgcaattgctgatggaatcgaagcccgtgatggtttccctgctgatcctaatgatatattcatgacagatggtgcaagtccaggggttcatatgatg

SEQ ID NO: 205 - DNA, 577 bp, Arabidopsis thaliana
tttttttttgttttaaaaaactcaattgagcaagtttgtatctatattcctttgtacataatactccagtacaacataaagccattaatttggttggctgagtactataattgatctttttatatgatcttacatctttctatgtattgatattgagtagtaacaagaagaactaatctttcgtggagtagcgactgcgaatgtagaggaacaaagccgtagatgcagccaccacatagggaaagattgtccatattcccactgcagttgctactgctgcaagagcaaacatggggcgttctctaaggagaaacccaatcacaagctgaagtggaagagtaatcaaaccaccgcaacaaactcctgcaaagaaacactctggagatattccaagagccccggcgaagaacgctgtaggattcctcattcccacagaaaatctttccacaaaacctgagaggttgccatacttttggactgcctgagtaatgcttaacgctttctctttaactataccgagctttgaacaaacatcatctgatgctccactttgtctaaagagcttaccaatgtaaaa

SEQ ID NO: 206 - DNA, 577 bp, Arabidopsis thaliana
ctttttttttttttttttttttttgagcaagaaagaagcaaactttaatacaaacccataatagtcttaggattaataaagtcacaaagataaaactttgcagagatatcttaatgaccaaaccataaaaacacacacagaagaagaagaagaagagaaagaccaacgtcgccggcaaaactaccggaaaaatcagccaattattacatataagcaaacctaacataacattagggttattacagacttagggtttatgaagttcttcatttgcaggtacaagggttgcacttgcagtcagatccgcatttgcaggcatcattctcggcaacgaaagtctcgccggaagcctcgtactgagagttcatcgccggagcaacaccgaggacaagagtctcggtggcggtgttctccaagtcagggtaccttttgcaacctccgcaaccattgccgcacttgcaggcagatccacaaccacagcttccaccacagcaagacatgttttttctagaaaattggaagagatctgagaagattttgaagatgatcttaatttgccttaaaaccggacgcgtgg

SEQ ID NO: 207 - DNA, 577 bp, Arabidopsis thaliana
agtgcacagacacaaaacttgagccctattacgggtattgaaatgatcaaagcaaaagaaaagaaaaagataaatcgaaacgaagcaatgtcaaaaaggcagtgttgtctgcttatcaatcattcttcgtcgtctgagttattaaacttagtcgaatgtgactcttgatcgatcaatcctcctctgtagcttcctcgtttcttcttcgtcttctcatgtcggaaatcccttcctctcacttgcccgagaacctcttgagctttaagaccatagccaatttcagcaccaccctttgaatagtacgagttgctattctcagtgtacacaatttcgtcaacgttcaccctctgaaacggtttcttcggctcttttgagttagaaagcccttttcctgacttctgatttgttgactttgtctcacttttctcagcatttccgttttccttagtttcagtctccttaacaggtgtctcttgaacaccctcatcgttttcaactacattctcttccttcttcctacgttttgattcttcatcatcatcctcagtctcttctttagtctcttcaggctctgatc

SEQ ID NO: 208 - DNA, 577 bp, Arabidopsis thaliana
gcgtaatccaattgattaaccatatccgattacactttatttggaccaaaccttgatgacaatgttcaatacataaattccacatttggttcacacatctccaacatgttacatataatgtcatgtcgtatatctgtgagaaagtagtagctcggcatgattcatactttaaaatccagcaaagcagaggtcccgccaagtcctttgccattgaagtaagtagcgtaatctctgatggtggtctctctgtactttggaggattttcttcggacacaagctctttaatgggtccgtacactctaggatttggttttacgtgggtatggaagaaacatgcgacagagactcgagctcttgtggctctgttcgccaatactctatgcttcaaactgatgaacttgtcgtttgttataagctgcagaagatctccgatgttgatgatgagagcgccgggaacatgaggaacatcgaaccagtatccctcacgacaaacctgaagcccttctatgttatctggtagaaggacggtaagaaaagagccgtcggagtgcttacttgtgccaaaagttaggtcag

SEQ ID NO: 209 - DNA, 577 bp, Arabidopsis thaliana
atatttttattcaggtccatatagactagagttttaacttttaagctcaaagacaaaagaaacgagcacacacacatagcacgacacaaactaaaccacatcttcttattttagatcaaactctaagtcttccttttattttatgatcacatttttattattatggttttgtgatctcgaccttcattcatcgctcttctcattccagttccttgagaaaatctttgttgtccaccaaaaccgttttccagccatctggatcaaggaatgagacaatcttggtgccgagtccaggaagaggtccggcttctctagtgatctttcctcctagctcttggttgactatcttaataacttcaccgcttttgtacacatcatctgtgcctattgcaatctgtgcatatgcattgccctttgtgtactcagtcacgtcgtagttataggtcagctccaaaactatcgactcgtattcttcagcataccccatcatgcctatggtgtacttgtactcaggtctctcaatctttctcaagagtctcatcccgagggccttttcatagaatttgcggacgcgtgg

SEQ ID NO: 210 - DNA, 577 bp, Arabidopsis thaliana
  misc_feature (1)...(577): n = A,T,C or G
ggatcctctagagcggccgcccttttttttttttttttagctttaaactaaatagattactgctttatatagtgtacataatattcttctaatcctagttacattataaatcaaataaatattctgaccttacaattaaacattcccatcttttatgaactccaccagcagcccactttcttgcccacgtgttcctcacccaaattaagaattctcccatgaacatgaatgaaggatattttcgtaactgtagggtgttgttaactttttttctcaactctgacccaatccgacgtcgttcgggaataaccggttcacatgggccggaacgagatnnnnctnncgtcagtgagggcccacattcttcagtgttttacgcgggagacaaagttaggtgtcaaaagagccgccacatccgacaaaaggccagcgcaagtgtgactgtgattccacataacgaaagatgacacgtggacggtgatcctttgttttgatccaaagctccttcgtatatcattgatgtatctaccggtgaccacgtcgtactactatctccggcaggagttgtcgacgacgt

SEQ ID NO: 211 - DNA, 576 bp, Arabidopsis thaliana
  misc_feature (1)...(576): n = A,T,C or G
atacatgtgattttaaacacctcacacacaagaaaaaaatcaaaccagctggtttatcttacattgccaattttaaaaaactgcaatctcttttctcctaaacctacattttgcactcgaaagttaaataaaaacaccactttcaattaaaataaaaattaataattagggattggttgcaaggagagtgcaaggagcgtggcgacagcaagtgatcaagtggtcgtttgtaagaccagcggcttgcatgaatgagtgaaccacagtgggacccacgaaccggaagcctcgacgaaccatgtctttgctgatgctctccgacttcgatgtcttgaccggaatcttgtgtccaagcttgtagttcgtggagattggtttgtggttcacaaatccccaaaggtatttctctaatgacacaaacgctttcttgatctctacgatctttttagcgttttccacaacacctctcactttgctcatctctatcttgtattcgatgcttattgcattcatctctttcncggtgagtttggcaaccacttccgcctcaaactccataaaggccttcctatagtc

SEQ ID NO: 212 - DNA, 576 bp, Arabidopsis thaliana
taaaaattgatcccaaaaaggcataaattaaaaatgacctaccaaaacgatatatataagaattttaaacaagtgaacgaaaataaataaaataaacaaaaggcaaaacggttcgattcagttcggtttaggtcttggtccgaacatatgtcatcaccggtccactgatctcaatctcaaattcactcgactcgactccaccaccgtcgtatgcttcgagtcaaactcagtgcgccgccgtcgagagtttccaagcggaggtggtaatgagtgggcgagtgtgccaacccaacatcaaacatccattactctcctccacacgataaccttggccactattaaacacagacaaaagcatactcgcttgcttaaacgcgttagacccaagatgtgccggcgctaaaccggacgaaccaaaccggtttccccattgactcaacgtttcgtgtctctcgactctgtcaggaccttcacaagccaccagattacaaatctgtttccctaagtaaacttcagacatgactttgtcttgactattcggaactccttccaacgaatcaaacagagtcgaataat

SEQ ID NO: 213 - DNA, 576 bp, Arabidopsis thaliana
  misc_feature (1)...(576): n = A,T,C or G
ccgatttcgctgaatcatgtcagacgacgagcatcacttcgaatccagcgacgccggagcttctaagacttatcctcaacaagccggtaacattcgtaaaggtggtcacatcgtcatcaagggacgtccctgcaaggtggttgaggtatcgacttcgaagactgggaagcatggtcacgccaagtgtcactttgttgccattgatatctttacttctaagaagcttgaagatatcgttccttcttcccacaattgtgatgttccacatgtgaatcgtgttgattatcagttgattgatatctctgaagatggctttgttagtcttcttactgataatggtagcactaaggatgatctgaagctgccaacagatgaagctttactcacacagctcaagaatggatttgaggagggtaaggatattgttgtgnntgtcatgtctgcaatgggagaggagcagatgtgtgctctcaaggaagttgnncccaagtaataataataagtaagcattctctcttttacagaggctatgtattatcaagtttgacagagtcaaatgttataagaacaaagttt

SEQ ID NO: 214 - DNA, 576 bp, Arabidopsis thaliana
aaaccctaatctcacaatctcctacgagatctatcagtctccacgaagatgaaggttgttgccgcatacttgctcgctgttttgagcggaaaagcttcaccaaccagtgccgatatcaagactatccttggatcagttggtgctgagacagaggattctcagattgagcttttgttgaaggaagtgaaaggaaaagatttggctgagttgattgctgctggaagggagaagttagcttcagtgccgtctggtggcggaggtggtgttgcggttgcttctgctacatctggaggtggaggaggtggtggtgcttctgctgctgagtccaagaaagaagagaagaaggaagaaaaggaagaatccgatgatgacatgggtttcagtctattcgagtaagctggtagtagcatgaaaagtccggttttgttgtcctcttttaatattgtaaccttttgaaatctatatgttgttgttgtttagtttgtattcgatcatcttttttagacattgctgaaattctcaagagtttttgacccgaatgtcatttgcactttgttgttagcatttctgcttcta

SEQ ID NO: 215 - DNA, 576 bp, Arabidopsis thaliana
aggacgtgtgatctatctaattccttgtctaattccaccactaactctctagagatcagaaaccaccaacgagaagagagagtccgagcaagaagagccaaacaatatgaatcaataacaaagcttgtccaggaacagaagcacttcctgcattacctgtgtcacaagctccttttttgactacgcgagcgccatggcaaactgcgtcgggacaaccgcaccagtacgtgactccatcggttccacaaaccggatccgcccggaaacagttgattgtgcatccaccccgatccttaacccgagggcatacgtcaccgcgggatttatctgggaaatcatccgcagcttgtaaaccgatcaagcagagaactaagaaaaggaaacgaatgctcagtgttaacgacggcatcacgtgaattgttgatgacgagagacagatttctaaaacccagaaatctaatccttcagaagaaccctagagattcgtggcggatggagaggaggtttctaattttgcgttcaaagaatgattgaaaccctaatttcatgagatttggggattttctcagagagagt

SEQ ID NO: 216 - DNA, 576 bp, Arabidopsis thaliana
ttttttttttttttttttttaatcacaacaaagatggattagattcatgatcaccagaagttattacactcactcgtcactccccataaacataaacgaagcaacataaactagtcacaaacgatactagttatttaatttattattacgaaaatgatgaacaacaattaaagatcaaatcacttcaagaaaccttgagccatcttggcataacctccaagcccaccaccagactcttcatcgtctttcttagccgccggctcaggctgacttgctggctcagcctgactcgtcggaggaggaggaccaccagcaccggtggagtgtgacgactcgtagtcgttgagatacttctcagccttgtcgaggtactgaccagtgctactcttttcatcgaacttaccgtatttctcggcagcgtctaagatatcagcagaggctccggcgactttacccttgtcgagtttgtctgattcgttacgagctgcggcttgagcagcttcagctacaaccttggcacttgccatgagctcggcgttggtagctggtcttgtagctgtttcggttccttcgact

SEQ ID NO: 217 - DNA, 576 bp, Arabidopsis thaliana
ccacgcgtccgctttgtcttcttcaggacctcctttctgggcagcgggtattattttcggttaaatcctcagaaacatgtgaatctgatttaagcatccctgtcaccctgaatggagaaaatgtagctctcgtcaacaaaatcgctctaactgatcaattggtggccggaagcgctattttggcggcaatatgtactgcacttgatcgtattggatatatctgcgaagcttcctttgaaatcctgcacaagtacagtcatgagaaaacctcagtgctactgaccattcttcacgtttttgcttacattgctggagagaaaatggtgttgtctagtgagcatggcatatcaattgcagtgttgaaatacattgtcatgtttctagaaaacaaacattttggtactgtggagggcagttctcgattgcacccaggcaagaacaagtgtccattctcagacaggtcttcctcgctggaggctatggcatctaagctcatggaaattcttcaggaatttactgagtctaatactttgcataaaagcttgactggttcattgggttctagccacctagaga

SEQ ID NO: 218 - DNA, 576 bp, Arabidopsis thaliana
gctcaacacaacgagtccttatagtagtccgcgagtgggactcatcaacggggccaccaccccgtccgtgcaacctttctatggaagtcctcgtgccgtgactgtgagaaacggttcatacaacactccactcgcccccgctgcagtttcaactaaaggtgcgagaaaccaacaacgagtgtttggaacgagcccactctcaggaaccaaaggcgtcaagaactcttcatatggacagaacagtcacacaaagttgtacagaggaggaggcactaaaggtcacagtaaaggaaacaatactcaacgccaacaccaatgacatgagaccaaaacatgggttcgaattttcgagtcagttgaggcacagttttttaaacgcctcacactcagtctcactctcacatgactcgattttttgtttgtgtttgtacagctatttccactgtattgatttctttctgatacgattgatgtgtgtatatatatgggaaagaggttggtaaaaagtaagaagacaattgttccgtggtgaaccaaaaaaaaagctcaacaaatcttcagctttgttttcaccga

SEQ ID NO: 219 - DNA, 576 bp, Arabidopsis thaliana
acacaacacttaatgcattgagcagaagaagaagaagaagaattaagaagagaaagaaaacaaaaaacatggaagttaatggagaagaagagagaagaagtagaagagaagatgaagaaaaagaagattactactactctcttctcaactctccatgttctgtttgtaacaaatttgttcaagccatattgaagtgtcttggtcttgagtcatcatcaataccaccatcttcatcatcatcatcaccatccttagtagaagaagaagattcaggaactgaaactgttgaagaaacaggatttatggcgaggataacagcagtgttaagaaggagaccaagaccaccaccttatagctcaggacgacctggtcaaaacaattgattctgattaacactcctgaagacaagcttgtgtctctccgtgtggatcttcttgttgtttaaaattcacttatgatctttatttttttttaccatctttttggttatgtgagcggtttgcttttttttttcttaatttatctgaaataagacaaaattggtaagactcttttgtaaaatagttttcatgttta

SEQ ID NO: 220 - DNA, 576 bp, Arabidopsis thaliana
gcgagtaatcaagtttgcaacaacatttattcaccaccacacataagagcacatttaaggtgaaaagactcgggcgaacaaaggatttattaaaacaccaaacatattttagcaaaataggtaagagagaaaagcaaatcaagcagcagcaacaactgtcttgtgcttctcgagattggcaatgatttcttctttagcagcaccaaccacagtctccttgatctctcctcctttcatgaagataaacgttggcattgtctgaactttaaactcctcagcaacagtgttcaattcgtcaacatcgaccttgaagaagactacgtcgaggtgcttcttggctaagtcagcaaagacgggtgcaacgaaacggcaaggtgggcaccatgttgcagtgaagtctatcacaatcagtttcttggattcgttggcggctttgagcttctcggtccaatcttcaacggtgtggcaagcgataacttctccttctgcggccattttctcttctctgtgtttgatttttgatcggacggtgggtcgacccacgcgtccgcagatctgggagcttcttgtgataga

SEQ ID NO: 221 - DNA, 576 bp, Arabidopsis thaliana
tcacgctgctcaaaatgtcaatgacaagatgatgtcgaacgcggggcatatcttccctcacaacactccaaacactaaagaagcttactactacagaatgatctttgaaaggttcttcccgcagaactctgcgagactaacggttcctggaggtgccaccgtggcttgttcgactgcaaaggcagtggagtgggatgcaagctggtccaacaatatggatccatcaggaagagccgctatcggagttcacctttcggcctacgatggcaagaacgtggcattgaccataccaccacttaaggcaattgacaacatgccgatgatgatgggtcaaggagttgtgattcagtcataacttcgaaggagaaatggatgaaatatgtgttatatcttcccaatgggtgaagtgttttgtatgattttaataataagaatgtgatcctttttttttcctatgaagatctgaatgtattatctatcttgtaaaaatttgtttctttgtaagatttgaatgtaccgcttttacgtagatcgatgtacatcaatcttataagtttcaattatgtaaaaaaaaaa

SEQ ID NO: 222 - DNA, 576 bp, Arabidopsis thaliana
tttttttttttttttttttttatctctggttttttactcgttctccattattaatttatgacgtttaagaaagactcacaaacaagatgaataaatgatacaaggggattttatggcatatgcagattttgttttgaagtaataatgtaacaaatcgacattgaagtaccttccacaatgcgcactatgcacaagaaaagactcgtcaaaagcaaagcaaaaggtggggatggctcttaaggtcaacagcttaagaatcttgaggagtctcgaatctagtcggtgtatcgatacccgccatacagcaaagtccactgatcaagatgagaagaaaaacgattcccactagtatgccctccaaaagtgatgacttaaatttgcagagttcatcacagccagtagcaatttcaggagtactgtttcctttagcagtttcagctagaaacctttggagagttttgtaagatgtgtaccaataaggatcagaaacataaagagctgtatatttactgccggattgttctacagaactaacaagttccaagaagctttcacgctctgaatgtgactgtccag

SEQ ID NO: 223 - DNA, 576 bp, Arabidopsis thaliana
  misc_feature (1)...(576): n = A,T,C or G
ccacgcgtccgcggaggaaaagtagccaccgcttgacgaatcattcatcaacacacgcagagagctctgaatctcgaggaagaagatggtgaggatcattcctatggctgcttcctccattcgaccttccctcgcctgcttctctgattctcctcgcttccccatctccctcctctccagaaatctctctcgcactctccatgttcctcaatcacagctttttggtttaannnntcatnngcttttgagaagaagtgtaaactgtttaggagttgctgaatctggtaaagcagctcaagctactacacaagatgatcttctcacctgggttaagaatgataagagaagaatgcttcatgttgtttatcgtgttggcgatatggaccggacgataaagttttatactgaatgtcttgggatgaagcttctacgtaagcgtgatataccagaagagaagtatactaatgctttccttggttatggaccggaagattcacactttgtgattgagcttacttataattatggagttgacaagtatgacattggggctggttttggtcactttggtattgc

SEQ ID NO: 224 - DNA, 575 bp, Arabidopsis thaliana
aggttaataattattatttattccatacttcattaggatcaaatgtatccgatacatcataattcatagctcaatcggagattattataatttagatagagtactcacacactcaagtaaaacatgaaccataaccatgacaaaaacacaagcaactccgatgataaaactcgaacccattactcaaccagagatctgaatagacttaacatcagccttcttagtctcagccttaggcaccgtaacagtcaacacaccattctccatcgcagccttaacctgatccatcttcacattctccggcaacctaaacctcctcgtaaactgtccactcgatctctccacacggtgccacgtgtcattcttatcttctttctccacgtgtctctctccactgatcttcaaaacactatcctcctcaatctcaactttaacttcctccttcttcaatccaggcaagtcagctttaaacacgtgggcctcaggcgtctctctccagtccacacgtgcgttcacgatcgctgagttctcacgagaaagtgatgatgatgttagttccttgaatggatcccata

SEQ ID NO: 225 - DNA, 575 bp, Arabidopsis thaliana
ccacgcgtccgcttctttaactctttgagttatttatttccagaagcttcatagtttctggaaaatgctaatccactagcggaataaaagacagatctttaatccactttagaaaccgcgttttctgaaaatgcggttgcgttttccgatgaaatctgccgttttagcgtttgctatctttctggtgtttattccactgttttccgtcggtatacggatgattccgggaagactcaccgccgtatccgccaccgtcggaaatggctttgatctggggtcgttcgtggaagctccggagtacagaaacggcaaggagtgcgtgtctcaatcgttgaacagagaaaacttcgtgtcgtcttgcgacgcttcgttagttcatgtagctatgacgcttgactcggagtacttacgtggctcaatcgcagccgtacattcaatgctccgccacgcgtcgtgtccagaaaacgtcttcttccatctcatcgctgcagagtttgacccggcgagtccacgcgttctgagtcaactcgtccgatctactttcccgtcgctaaacttcaaagtctacattttcc

SEQ ID NO: 226 - DNA, 575 bp, Arabidopsis thaliana
aacgaaacacttttattattattaaccacgactcatgaatcgtgcgtggtcaatcacaaactaaaacataggaaaaacatcgaatagaaaacgaaatcctcaaaatataacttaaagctcatccctcttgagtgcggatggacgaacaccttgagcgaggaaatctttgtaatacttggctgattctttctcataacgtgtgaggttatttttgaaatcgacgtaatagagtccgaatctgtttttgtaaccatcttgccattcgaagttatccaacaatgaccatacaaagtatcccgtaactctcaccttatcgatgcaaatagcctcgttcatagccagaagatgcctctgaagataatatttcctgttatgatcagcagtaccaacgtcaaccgaatctgtggtcccaagtttatctccatatccattttccattatcataatctccgggtttgcgtatttgtccttgatgtactttaaaagctttctaaatcctttagcgtagacgggcaatgcagcagtaagaggcatgctaccaatggcgctgtgatctacattcttaggttcccagg

SEQ ID NO: 227 - DNA, 575 bp, Arabidopsis thaliana
ccacgcgtccgctcgtctttgcctttcgtctcttctctgctcgccgatcgttactccgtcgaaatcaccatggcgccaaagaaggataaggttccaccaccgtcatcaaagccggccaaatctggaggtggaaaacagaagaagaagaagtggagcaagggaaagcaaaaggagaaggtgaacaacatggtgttgtttgatcaaggcacttatgacaagcttctcactgaagctcccaagttcaagctcatcactccatcaatcctctccgaccgtatgaggattaatgggtctcttgcgaggagggcgattagggagctaatggcaaaaggtttgatcaggatggtctctgcacactcgagccagcagatctacactcgtgccaccaacacctaaaaagcgtgacctttcaatggtttggttctcgactcttttcttggtttttgtcttttgatgtatacattaatcatcagaactcttatagttcttttttggttctcgttactttgtgctccagaacctctttagaatgttgttttgagatattgtctctttaatcggagttgctttttccc

SEQ ID NO: 228 - DNA, 575 bp, Arabidopsis thaliana
  misc_feature (1)...(575): n = A,T,C or G
ttttttttttttttatataaatagatgtcgctcagcttaaccattaatctagttataataattgggaatttgggatccatacaacaacaactttaatatacatttcacattaattgtcaaacagataagaaaagatcatacgaaaatagagcagctgattttagcaatcaaatttagaacaatcaatctgcagaacattagacaacaaacaaacaaacaaactttaaacttgttctttcactctaaaacctgttcttctccttgcagttgcttctcaccatttttcttgtttttctcattcaccaaagttagtcaaaacgaaactacaactacgcgannntcactcctccacaacaccaacgccattctcaccagtctctccatcatggccactattaaacatttcatgtacttcttcagactttggtgttccctttttggactttctcatctgatctttgctgctgctatttggtgtccttgggacactgttcgttttgacttcatccttgcaaccacctacactgtgacgatgtcgagcacaatgcttccccttcacttcctgatatgatgcg

SEQ ID NO: 229 - DNA, 575 bp, Arabidopsis thaliana
  misc_feature (1)...(575): n = A,T,C or G
ccacgcgtccgagataaagggtcgataaggtctttttccgtttccttgacctctctgggatttggatttcgatttggatttcgatttcctcatctcatcgatttgcttctcaatctctccaattcgattctcctctggaaatttcaatcctttttatattttccttggtgatttctaagataattaagatcgagaaaaggagaattttgagagagaaagcatccatccatcgatggccgctatgagcgacaaggaagctatggtggatccttttttggtcgaggctcttcagaaccctcgtcatcgtctcaccattttgcgtatggagcttgatatacagaagttctttcaaagtccagagcagcaacaatatgagttccagcctttgcctacatcttatcttcgtcttattgctcaccgtgttgctcagcattacgggctatttaccactgctttagaaggtggtggtgttgatggctcagngaacagaatcctggcgaccaaaacggttgaaagtagatacccttacgtctgtttgtctgagattcctgtaaagcaacctgagattcatggta

SEQ ID NO: 230 - DNA, 575 bp, Arabidopsis thaliana
  misc_feature (1)...(575): n = A,T,C or G
tttttttttttttttttagaaaaatctcgtttattcatttataaaggcataaagttacacaccaatcactaagccaagctcatatgtcatatatcataaagtaagtaattactaatggagagagataactaaaaggcaaagccttctttttattcaagccactctcatactttcattgtttgaaatcacacaagtgttgcctttccgagctgaagagctttctctcgcccgtaaaacttttcgacaatggcaagtgaaaactccattgcagtccctggagctctgcttgttatgacatttccatctaccacgactctgtgctcaatgtgactcttgtccgaaagtttgtcgctcaccactgggtgagtagtagccttcttacccttgagtaaaccattaggctcgaagacgtaagcaggcgatgcgcagattcctccatatggtttgtttgcttctgcctgtttcnttaacatattaactagcttctcgcagcttgcgaatctttgagcaccgttaagaccgccaggtaacacaatcagatcaaacgacttctctgcaacctcatcaagaagaac

SEQ ID NO: 231 - DNA, 575 bp, Arabidopsis thaliana
aaaactctatcatacatccaacgatccttttgttacaattagaggaaaccaaacgcttctctattttattcattacagaaccgcacttaacatatgaaaatagggttcactgcaccagatcattacccactaatctcctcttaaagaccttgacaaaattacatgtaataataatcaatcactgcttgttgttcaagagagctgctcgtagctcagccgcgtcaatctcgttggaaccggtttcgggtctgtaataaccggttttgggatctggaacccaagaaatcttctgggttgattcttccactcccttcttcttcatcacagccgaagcaacagctccacttcttccaccgctcgaaacgctcccttgcgccgccgtggccgcataaccacgtcggaagatagcattggagagttcacgagagacgaaagcagatacgatcttaacgttagagatagaacgagccattttcgaagtaagtggtttcttgaaaagagagaaaacagactttttattcttgtagcttcttgtcgccgccgcagaaggagagatatatccgaggaatgagata

SEQ ID NO: 232 - DNA, 575 bp, Arabidopsis thaliana
ccacgcgtccgaaactgtgtttccatatctctagaccgtttagtcggagaaatatcaacgttggtcgacaaatagtcataattcgccggaataccaaaattagagaaatacccatcagtcccagaaccagacccactaagaaaatcagccggagaactattctgacggtgaaagccaccaccttgatgatgattatacaatccttgctcaacagaactcaggaactcgaacgagtcgtcacgactcgttatcactcctccagagttattattaccagtaagcagctctgttaaacaaaggttaggttttaaaccttcttcttcatcttcttcgagtagggtttcaatccaagtagctggagctgaacggatccgagataatccacttcgactcacctctcctcctcctccaccaccaccaccgctacttccgccgcttatatgagtggattgcatcggggtctccaccggagaatgtctttagtcggtgaattgaattcgcgcttttttatgggtggagacaattagacaaaacaatttattaaattttagcagcagaccagattgttctccgat

SEQ ID NO: 233 - DNA, 575 bp, Arabidopsis thaliana
cactaatgtccggcgagagagctcatgcagcagtggactgctcatcgttgatactaaacatggctgattgtttgtcgtttgtgactagtggtagtacagttgtcaagccggaaggaacatgttgttcagggcttaagactgtggttaggacaggaccagaatgtctatgtgaggctttcaagaacagtggttctcttggtttaactcttgatctttctaaagctgcttctcttccttctgtttgtaaagttgctgctcctccttctgctcgttgtggcctttctgtctctggagatcctcctgctactgcccctggtttatctcctacggccggagcaggagcacccgcgttgtccagtggtgcaaatgcggcaactccagtttcgtccccgaggagttccgatgcgtccttgctctctgtatcttttgcatttgtcatcttcatggcactcatttcttctttctattgagtcttaaaatttaattgcttcttgttgagttatttttgtttgctatgtagctgaagagtttggtgttactgatcatatttacctttcatgtgtcaattttaatga

SEQ ID NO: 234 - DNA, 575 bp, Arabidopsis thaliana
tattcttccttgtcaacttggacaaccctaatgacattgggttgtcttctgcttcatttatccatttccagtgctcagctaaccccaactttctatgacaatacatgtccaagcgtctttaccatcgtacgggataccatagtaaacgagctaagatcggatcctcgtatcgctgcaagcatccttcgtcttcacttccacgactgtttcgtcaatggctgtgatgcatcgatcctgttagacaacacaacatcctttcgaacagagaaagatgcggctccaaacgcaaactcggctcgaggatttccagtgattgatagaatgaaagcagcagtagagacagcatgtccaaggactgtttcatgcgcagatatacttaccatcgcagctcaacaagctgtaaatttggcaggaggtccttcttggagggttcctttggggagaagagacagcttacaagcattctttgctctcgctaatacaaatcttcccgctccattcttcactctcccacaacttaaggccagttttcaaaatgttggacttgaccgtccctctgatctcgttgcactctc

SEQ ID NO: 235 - DNA, 575 bp, Arabidopsis thaliana
ctttttttttttttttttaatatatatgacataacaatgtgtatctttgttatgcacattatgatacacacacccgaataacaagttcatccacgaatatataaaagcagtaattacaaactcaatcgggtttcttctaccttaaccacttataccggtgtagattacaatcaaaccaagcaatggcaaatgcagtttagtaatctcaacctgatcattcaaaatctcaccagctctttctatatatccccggtgggcataatcttcaatagcttgaccagatcatatgacttgaaatctcttccaaagcacagagccaagtccaaagctaatttcccatccttcgttcgtcttgttttatcagcaccattggtcaacaatatctttgtaatgtctcgatttcggctttgtacagctatatgtaacggagtccatccttcattatctgcaacattgacgtctacattgtacttgaatagtagttttacagtctgcaaggctccaacttgaactgcataatgaatcggagctgcaccgtcccgatcttgaagatgcggattagctcggacgcgtgg

SEQ ID NO: 236 - DNA, 575 bp, Arabidopsis thaliana
  misc_feature (1)...(575): n = A,T,C or G
ttttttttttttttgatcaccaaactacatgcttttatttccaagaagcagctacaatatagtttgttaggagtgccatgaactcatgaaagcagagacactacaatcgagctcttttgtttttcttttcacttcaattgagcaaattgaagatatgattttattactcaaactatcttttatgttttntagttgcaaaatcttagaacatgacagttagaccaagagcagttgataaatcaaacaaaaaggcaggcagatccgtggctgatgctgccgtcacaaccttcccatcagttacacatcccttttccatcacagcctcacctccagccaccttcaccatcaccttcatccctttcccactcgcgcatcgcttccccttaagaacaccagtggctgcaagaagcaatttcccctgtccaatagctgcaaacaccttatctttctctgcaaaactcttaaccaaagcaacagccttttcattcatcaccaatagctcaggtgatctccctcctggaaccactacacagtcataatcatccacacatatatcatcccacgatgcagtcaca

SEQ ID NO: 237 - DNA, 575 bp, Arabidopsis thaliana
cctctagagcggccgcccttttttttttttttttaagaagcagaaacaagcattgttcttatttattattaatggtgttacaaaagcattgtaaatttttgtggaatttgttgtatctatctagtatgatgctcttttgaacataacctttagtggaacatcacttaaagcaagtcttctctttccatcttgcacaaacactccaacgtctctacagatgactttgcagaaattgcagacagtaggacaaaacctgatcttgtaatctttttcaaatttgtcgatcttgaaccagttaccaaccgttttctgaccgggattcccttcaacgccacaagttgaaatgaaccattgtttcgtcgtctcgtcgaaattggctaattcccagatcgaagttggagaggatttgatgtttacatcagttgagacagggatgattcttgatttgtcatatggtgagaatatccatggtaggccttgagagacttcaaattggtcttggatcacacttgtgggacaggtttcggtctttaagtttgccatggttagtccgcctccacggccgcgaattacag

SEQ ID NO: 238 - DNA, 575 bp, Arabidopsis thaliana
  misc_feature (1)...(575): n = A,T,C or G
caaactccatttagttaatgggtatgagtaagagaaaaaagttaatttgggtatgcaaaacccattcatttaaactcatttagggaaaaaagttaaatggggctaaatgggttacccaaactaaactcatttattaaaaagttattttcaccgttactacttatttcaatttttctttcatcaactggcaaagtggactgggccaatcacattttagccatttgagctgaacttgaccaaaatacccttcaacacaactgcaactgtgactattcatgttcagttgatttgttttactggttacgcttttattttaaaaatttataataaaatcaaaactttttgctgcagaacaaatgtttcaaactaaaacccagatttgtgttcatgtataattgaaatcgaaaaaaatgaaagtaaattccggtgagaaagcaaatgttcttccgaaagaattgacttaaccaatggataattaaacaaaactcaaacnnnnnngctttttgaatttataatatgttaaatgtacaatatttagatgtattaagcattcaaaacgtaaatctaaaaaaaat

SEQ ID NO: 239 - DNA, 574 bp, Arabidopsis thaliana
  misc_feature (1)...(574): n = A,T,C or G
gcccgggcaggtctccatcttcgattttacctattattgatacgagaagtaggaatttgcgatgcacatttcagtctcaggtttcttgtgggattcagagagatgataatggacgccgtgtttggcggaggagaacattgacgaagaaggacgatatgttgcgttacaaaatgcaaagagttccatttgtggaagaacaagtaaggaagataagagaagttgggaaggtaatgacaatggacatagagcagcttcttttgagggaagacaatcggtttgaatttgtcaatagcgtagcagctgaagcaacagagtacgtggacaagaacagagacgaatatggaggttccaaaaaagctatctttcatgttctaagcaaccgtgtgaacgatctcggctttgaccgccctgaggcttatgtagaagctgatccttacaaacccggtcctggctatttgttggagtattacacttgatatattataacaaaagtgtcaatgtannnnacatcttttgttcttgtattaccaaaaccaaatcaatgcattcactagcttgtacctcggccgcgacc

SEQ ID NO: 240 - DNA, 574 bp, Arabidopsis thaliana
cgagcggccgcccgggcaggtacttaaccgcttctaacgagcggttcttgctcggggctacggggaagaaagtgattcagttgaaactgatcggttgattcgtctgttgagtgggaaccgcttagagaagggtctaagattaagcttaggactagatctggtaactatttacgaggtaatggtggtcttcctccttggagaaactcggtcacacacgacgttcctcatttgtctgctactcaggattcgatttcttgggatgttgatgttgttgagatcttgactgattccgaattcaagacggagtctgcgaaagcgccgccaccgaagacgacgtctccaccgccgcatcggagaccgacgagttcgccgttgtcggctgagtctccaaggacttcgtcttctctttcagacagatccgattcagattcggttgagtctccgcctaaatctgatggacgaaccatatattaccatgtcgctgacgaggaaggacacgtggaagatgaaacaaccgttggatatgctttcacgtttaaaggaaatagcgtggcggagctgactcagacattgc

SEQ ID NO: 241 - DNA, 574 bp, Arabidopsis thaliana
gtatctctcgtcggaaaaaccttggccgtgatgggtttcgggaaagttgggacggaggtggcgagaagagccaaaggtctaggcatgaccgttatctcccacgacccttacgcgccagctgacagagccagagctctcggtgtcgatcttgtttcattcgatcaagctatctccaccgccgatttcgtctccctgcacatgcctttaactccggccaccaaaaaggtcttcaacgacgaaactttctctaagatgaagaaaggtgtgcgtctcattaatgtcgctagaggtggcgtcatcgacgaggatgcactcgttagagctctcgatgccggaatcgttgctcaggcagcattagatgtgttctgtgaggaaccaccatcgaaagatagcagactaattcagcatgaaaatgttactgtgacacctcatcttggagctagcacaaaagaagctcaggaaggtgtagccattgagatagcagaggctgtagcaggggcattgaaaggagagttatcagctactgccgtcaatgctccaatggtggctcctgaggtcttgtctgagttgactc

SEQ ID NO: 242 - DNA, 574 bp, Arabidopsis thaliana
tgtgaagtatcacgactttgatttatttctgtgtatctaagatgcaggcggtatcagttgatgaaaccaaaaacacggtggtgctacgggcggagcacaagaatgaagaaggccggaaatctgttgataagttcgaagtgaagacacgtaatccggagacgatcaagagcgttgagcggaagcttatggagaaaggtgttcaacggatggatcgtcatccttccgatgggattcctctcaggcgaccaccatcgaagtcaggtcacggcgggaagtacacgtgggaaggacctgatcggatggaggattacgagatgcagccggatccaccggcgatggatgaaggagatcctaattacgacgaggaacaggtgaagaagagtggtgatgacgtggcggttgagcttgtgaaaggagaggttgaggtggctaaggaggctccggctggtgttgctagggttgaggttgatcctcgcttggtcggtcgttgagagtttgatagaggaggaagaaaaatgttggggcgaatgtgagaaagagggagaaatgtggggttggatttttaatttcgagt

SEQ ID NO: 243 - DNA, 574 bp, Arabidopsis thaliana
gcggccgccaaaactctcacaaagacaaagatcttctcctccttctcttctctttttcacttttctctcttcccctctctcgaagcttgaaaggtaacaacaatggagaaccctccggatcaaacagagtcaaaggagactcttcaacaacccattacaagaagaagaacaaagggtggtcttctcactatgcccttcatcattgcaaacgaggggttcgagaaagtggcgagctatggattattacagaacatgattctttatctgatgagtgattacagattgggacttgttaaaggacaaactgtcttgttcatgtgggttgctgctactaatttcatgcctctcgttggagcttttctctcagattcatatttgggtcgctttctcaccattgtcattgcttctctctccagtctcctggggatggtggttctatggctaacggcgatgttgccgcaagtaaaaccatcaccgtgtgtagcaacagccggaaccaactgcagttccgcgacatcttctcaattggctctcttgtataccgcattcgcattaatatcgattggatcaggag

SEQ ID NO: 244 - DNA, 574 bp, Arabidopsis thaliana
  misc_feature (1)...(574): n = A,T,C or G
tccgcatgaatgtcgtctcttcttatgctgcaaacacacttcccgttgtgtttgatcgtggattgatcggaacatatcatgactggtgtgaagctttttcgacgtatccaagaacttatgatcttcttcacgtagatgggctgtttacatctgaaagccagaggtgtgatatgaaatatgtaatgctggaaatggataggatcttacgtcctagcgggtatgcgattatacgcgaatctagctacttcgcagattcaattgcatctgttgctaaagagctgagatggagttgccgtaaagaacaaacagagtctgcatcagccaatgagaagctcttgatttgccagaagaagctgtggtattcatctaacgcaagttcagaaacaaattaaataaacaaaaaagaaagaaataataggacaaatcgaaagcttaagcttaaagcttttgttttgttcggaggtttcttgagnncaaagtctcaacaacaacacgcataggttctttgtgttgcttcaaagccaagaaagctattgaaagctgccaattcattttttattatccccagcatatt

SEQ ID NO: 245 - DNA, 574 bp, Arabidopsis thaliana
ttttttttgatttcataaaagcatataatgcaactgataaaaataccgttgaacagcggaattattccacgagtcaacaattatcgtcaacatggaaacaacaagaagatgactcttgaacttaaataaacacacatttattatcagagtggttttctaaggccatccccagaaagccaatgattcaccgtgatgatcgtgcgacggtgaagtggtgggcacaaagacgtcggcgaaacagctccggtcattgtcatgatcactggcgttgctgttgtcttggatgggtacgatgcttgggaagtaagagtcacagctgtctagtagttgaggtgcgtcgtcgtctagtaccgcgctcccaacgctccctgaacttaaccggtcctcggttttgattgctgccgcattaatgtaaaccggatcaagttggtttggttcgggcacttgaccaggtggttcattagctgtctcttgtttgccctgaagcttttcggtcagggaagtaacctcggatctgagcttatcgttgtccatgacgatggagtcgtagttagaaagaagttggtcgtaagtg

SEQ ID NO: 246 - DNA, 574 bp, Arabidopsis thaliana
ccacgcgtccggtttgatcagcttgcaagagctctgcaaccatcttcgtcagagaaggaagaaagaccgtgaagctgtgactgaagatgattgtcttcgagctattagcaagctaaaggtattgggtagcggatttgaggttatcactattggcaagaaaaagcttgtccgttcagtacccacagagctgaacaaagaccataaccagattttggagttggctcagggccaaggctttgtgattgtggaagaggtacaaagacgcctctcatggacatctggtcgcgttatagatgctctcgaaactttgttagaggagggccttgccatgatcgacaatggccataaagacggaaagtgtcggtactggtttccctgtgtttcttcggtttactcatccatcggatctgatacttaaatggtacatgctcagttgttttgcttgttttatacagtattaaatacagtcacactcgttacatataaattacgaagaaatcttttcagtatattactgaaattttcttgtacatgtatcactctgtaaaaaaaatatttatgcttggttgttgga

SEQ ID NO: 247 - DNA, 574 bp, Arabidopsis thaliana
tttttttttttttcctcagattgaaacttttataaatccttataacaatcttcgaaaacttgtccaaaagaaacgcaacaacattatgtctcaaatgaaaaaactcttggtaacatgaaacttaaaaggttctaaagcaaacacacttaaaagagaaaggaacagtcgatccaatagtatacatgctacaatgcctgcaagccgtggccatgagccatcaaagttaaggagactcacttcctctaggggaagtgcggtttggctcgtaatcatcatcaacagggctccggtcctctttcgaactgtcaccaccggctcctacaacaggactgacaacagagtttctgccattgtcttgggggctaccaccgtcacggtcagatccgacttccttttgaagctttggtgatggtggtgggctcccgtctatgatctttgggctgccttcatcatcaagaaccggactacgatctctggctcttggcgatagagagtcatccatccgctttggactgcgtgatctctcctccacactcctctctcttcttctcaccggggatcgtgatcggctgta

SEQ ID NO: 248 - DNA, 574 bp, Arabidopsis thaliana
gcggccgctaaaagttaaagccatggctgcatctttctctgtcccctctatgataatggaagaagaagggagattcgaagcggaggttgcggaagtgcagacttggtggagctcagagaggttcaagctaacaaggcgcccttacactgcccgtgacgtggtggctctacgtggccatctcaagcaaggctatgcttcgaacgagatggctaagaagctgtggagaacgctcaaaagccatcaagccaacggtacggcctctcgcaccttcggagcgttggaccctgttcaggtgaccatgatggctaaacatttggacaccatctatgtctctggttggcagtgctcgtccactcacacatccactaatgagcctggtcctgatcttgctgattatccgtacgacaccgttcctaacaaggttgaacacctcttcttcgctcagcagtaccatgacagaaagcagagggaggcaagaatgagcatgagcagagaagagaggacaaaaactccgttcgtggactacctaaagcccatcatcgccgacggagacaccggctttggcggcaccacc

SEQ ID NO: 249 - DNA, 574 bp, Arabidopsis thaliana
  misc_feature (1)...(574): n = A,T,C or G
tcgagcggccgcccgggcaggtactcttggatgtttgttttcgggttaggtttcaacgcgtggacaacatccgggaactgaatcccatcacggatgaagaacaccggagtgttgttcccaacaagatcaaagtttccctctctggtgtaaaacttgacagcaaaaccacgaatatccctcatggtttcaggactggcacgttcgtggacaacagtggaaaaacggacaataactggagtttgaacaccaggggctctgagaaaatcagcacaagtgaggtttgaaatgtcatgggtgacttcaaagaaacccttagcactgattcctctggcatgaaccactctctcagggatcctctctctggtgaaattggcaaccttctcgatcaaatgataatcctcaagaagaaccggacctctttctccgatggtgagggaagagatgttgttggagactggagcaccaccgtttgtggtgtagaatggggcgttgtacgcgctcgnnnacgatacttgtaaggatccatggtgatgatagaaggttgatgatcccccaaataggcttttgaggattt

SEQ ID NO: 250 - DNA, 574 bp, Arabidopsis thaliana
gcggccgcctttgttcatcagtttactttatggacgaggtcctcatgtagatttgactttgtttcaaagcggaggaagaaggagaaggcaacactaaaagatcaaaaccttagatctttgcttacgctttcgcctggttaggaacggtttttcagaaacaaaagattccatttttagattcaattcccttctggtttgaaaaatgatatcaaaatggtgaatagaagtgatttggtggtgattggcatctcggttgggcttgcacttggtctcttgctcgctctgcttttgttcttcgccataaaatggtactatggccgctctcacctcaggcgatgcgctaatgaacagaattccccgactctacctgttcacactgctaaaagaggtgtagtaatccctgatgatagagcaaacacagaatcgtcacagccacctgagaatggagcaccaactcaacatcagccatggtggaacaaccacaccaaagatctcactgtatctgcatccggcatacctagatataactacaaggatattcagaaagcaacacaaaatttcacaaccgttctag

SEQ ID NO: 251 - DNA, 574 bp, Arabidopsis thaliana
ttttttataacaaaaaaatttgtatattatttaatccaatgaagagtgacatttttatacaccccaagagaacccactccaaaaatagacaaaacaaccttatttgaaagccacacaacttattaagtttagttaacttaatgcatatgactcaagggatctaacttattaaactgattccaacactttctcataaccagatcttctactttgagagctaaaacattccgtggcaaaattcattgctttatatatacaaagcccactcgaacgcagcagaaatgtcgtctctctttttaaaggccaatgatcggaagctacgacaaaatttctggaatgtcaaaaactcagcttcgtagacaagctgtataccataagatatcaacaactgcttatcttttgtagtgatgataacaacactccccggaccaaaaccgttgaaatcccctgcaagagcatctaactgttcaagcttatcgacgtcgtctgccacaagcagaaccttttgcttcttgagactttgtttgctagagttttctcctttaatatttgccagaagctctttgtgtagatg

SEQ ID NO: 252 - DNA, 574 bp, Arabidopsis thaliana
  misc_feature (1)...(574): n = A,T,C or G
ccacgcgtccgaaaacaaaacactctcctgtgacttctcttctcttcttctctctcgatctcttccccaaaaatcttcagatctctacatcaccggagagacgagaaacactcaccgtgagaaaaccatgattccttacgctacagtcgaagaagcttcaatcgcactgggacgaaacctcacacgtctcgaaactctatggttcgattactccgccacgaagtccgattactatctctactgtcacaacattttgttcttgttcctcgtcttctctctcgttcctctccctctcgttttcgtcgaattggctcgatctgcttctggtttgtttaatcggtataagatccagcctaaggttaattactctttatctgatatgttcaaatgttacaaagacgtcatgacgatgtttatcctcgtcgttggtccattgcaactcgtttcttatccttcgattcagatgattgagatacgatctggattaccattaccaacaattacagagatgctgtcacannnagtagtctacttcttgatagaagactacactaactactgggtacatagattc

SEQ ID NO: 253 - DNA, 573 bp, Arabidopsis thaliana
gagacaaatttcatttcattacacagtcacataggttggctcctggttaaggtttacctttggattgtactgaaaccgaaggctacacgttgtcaggcttctagagagagatcgtccctaaaaccctagagagagagtgagagaggttgaaacagtatactccatgtttcatcagcaaactgtccgaccatagcatattgatgcaatgtacagatttttcgcccatttctccttgacatgggtacttgggaaggcagaagtccggagagtctcttgggtttcatcggttatttttcgtttaggtatactcaatataagagctgcttgatcagctgttgcagccattgatgttatcctgtatccactttcccaccttcgatgtattccttcacttgggtacaagaagtcaagctccaccacctgttcagagtagcctgagttcctggacattactacaccccaacgactcccagcggtggtcatggatgttacatgaaaaccttctttccactttttatttatccacttgaatggaaatgagtcgctgactttgtaagattgctgggtataagg

SEQ ID NO: 254 - DNA, 573 bp, Arabidopsis thaliana
ccttttttttttttttttgtttttaaagtatcttcaaatgttaaaagagtgttgacataaaaggagaaacaatcagacaatatggtacaataacaacaacaacaacaagaaggaagaaacaacgaacagagagtttcatgtatttataacaagcataagctaataactagcatcgagagcttttagtttaatctgtccttaaacctgaatcttgaacatgtcaatcacctcaaaaacgtctccataacgtcagggaacaaacccgagttgcttccagagttattgttcctaaactccagtggttgttgctgatcaagcgaggttgatgatgacgaagaatccattcgagctggcaatgtatagcttcttctaaacttgttaggatgatgaccttcaaggttcaagaactcgttctggttttcgacattcatcgggttctgctcctggttaaacaaaagcctactagcttcatctgcacgtccagtcaacgcattgaacaacgacaaaccattaggccatttgatgtcgtcttcatgctcttccattggaggaagcatctgaggaggaacattg

SEQ ID NO: 255 - DNA, 573 bp, Arabidopsis thaliana
ttaatggaaaatgtgatttattgaccattagcttacacaccggtgttttgctctgtatatgtcgatcttattttcagtgttcacctttacatttacagattgtttagtataggaaacacagagttgatatggtttagaatttagacaggagaccgtttcttgagtttcttggctattcctgcaaagtacttgccatggtaatttgcctgctgaatctccagctctgttggctcgcgtgatccatcagctgcataagtccctgagccataaggcgaaccacctttcacctctcccatctcgtacatacttttaccgaatgtgtatcctaccggtacaaatatcatcccgtgatgagccagttttgtcactgccgtcaacgcagttagttcttggcctccaccgtggaaacccgtactccagaagattcctgcaggtttcccagcgagagcctgtgtagtccagagatcatttgtattgtcaaagaaagtcatgacctgtgatgccatcactccaaacctagaaggaaagccaaacatgaatccgtcggcttccgccagttgttctggtcgaata

SEQ ID NO: 256 - DNA, 573 bp, Arabidopsis thaliana
ccacgcgtccgcctattccagtgaataaggattcactctacaaggcaatcgaaagaaagcaaaagaagttcaatccactacagattccaaagcgtctagaaaaagatttaccgtttatgtcgaaacccaaaaatataccaaagcggaaaagaccatcactagaggataaaagagcagttataatggaaccgaaagaaagaaaagagcatactatcatccagcaattccagctgcttcaacatcacacgatgaagaagaaaaaggcaacggatcagaagaagaggaaagagtatgaagcagagaaagctaagaatgaggaaataaataagaaacgtaggagagaagagagacgggacagatatcgtgaggaagataaacagaaaaagaagacgagaagaagccttgattaatttattaataccttatttcaacttttgtgtaatactaaaagttttgttttcatctctattgttcttctgtgttgttttttactttaaaacttatgaatttgtcaatcacatttctcgaatgatcactttctaccccaaatttttgaaatactgaaacttttct

SEQ ID NO: 257 - DNA, 573 bp, Arabidopsis thaliana
ttttttttatccctaatctcttcctataatattaaaaagttagaagtacaaaaaaaagaaacattatttctcaagttaaaattacaaattcaagattctaaaactttgtaaataaccacgaagcaaggtaatatagctctcgggttataaaccacaagctcctcaagattcgaataaactccagcgttgaccgccaccgagtcaaacgtaccaccacttgaagaaactccaaccaccgagttatcctccaccgttgacttcttctccgctgtagccgaagcatccgccgccggtaaatcaactcgcttaactctcccagcgatcacacggcacacaagcatcactctcctcgcatcatcgttacatttcagcaaatcatcagctcttccgctgctcgccgtcgtcctcacaccggcatttgcgacgttggctcctccgccgccagattttccttggaatccgtggcggatcacggtgcagacgccacaaacagggaggttagagcagagagaagaagatccacgagctccgagagaacaagtgagagtggtgcagtgaaaacgtagaagctcg

SEQ ID NO: 258 - DNA, 573 bp, Arabidopsis thaliana
cttgacagagaagaacaaggaagaagactaagagagaaagtaagagataatccaggagattcattctccgttttgaatcttcctcaatctcatcttcttccgctctttctttccaagctcataaaaaatggctgaggctgatgatattcaaccaatcgtgtgtgacaatggtaccggtatggtgaaggctggatttgcaggagatgatgctcccagggctgtttttcccagtgttgttggtaggccaagacatcatggtgtcatggttgggatgaaccagaaggatgcatatgttggtgatgaagcacaatccaagagaggtattcttaccttgaagtatcctattgagcatggtgttgttagcaactgggatgatatggaaaagatctggcatcacactttctacaatgagcttcgtattgctcctgaagagcaccctgttcttcttaccgaggctcctcttaacccaaaggccaacagagagaagatgactcaaatcatgtttgagacctttaactctcccgctatgtatgtcgccatccaagctgttctctccttgtacgccagtggtcg

SEQ ID NO: 259 - DNA, 573 bp, Arabidopsis thaliana
tttttttttttgtttgtctcaatcgcatactatgattcaaggcttaaggattcaagaagataaatgttctctccaataaagattcgaaaaacaaaactcgaaaaatctgatcaaatgttgttgttactataagatagtttaatcctcttcttcaatgatcttagtgccgaggccagagagtccttcagcagggatttcagcaacagtgacaagagagaagaactcttcctttgcatcttcatcatcatttctcttacgagcaactcggactctgattctcctcggaggacctctgatacctttgctccaaatctgcttgttcaatttaacatccactctcacatcctttgtccccatttccttctcagcaaacttccttatctccttgatcgcctttggagccttcttcttaaaggtacagctatgaaggcgtctgtgaaggttgatggtgtactctctggtcaccacctcctctttccttcccttcttctccgacattttatgtttctatcttctctctttaccttcttctctccacaaatgccgaaatacagagccggtgcggacgcgtgg

SEQ ID NO: 260 - DNA, 573 bp, Arabidopsis thaliana
tgtgagtccgtttacaaaatacgctctcctgatgaatccacttgcaaggagtatagaagaactataccggaaagaatgtcagagaacatatggtgctttcttcttctaagaacagcactcgtcgcttcttctgtttgttctgctttccttattccattttttggtcttatgatggctcttataggatctcttctcagtatactagtggcaataataatgccagctttatgcttcataaagataatggggaacaaagcaacaagaacacagatgattctgagttcgatcattgtggccatcggggtggtaagcgggaccttggggacatattcttcggtggcaaagatcattaggaactatcagtgaaggaactccatgacaaagagacccatagtttatcccctgtactttgagttgaatgtttttgttgaagctaataaactcttgattatgaaagattattttggacttgaaagttaataaaactagtgaaaggtttactttctcataggtgtcacatttgcttttgtatttttgtgtatctactatctcttcatttttctgaaaaaaaaa

SEQ ID NO: 261 - DNA, 573 bp, Arabidopsis thaliana
tttttcctatcaatcttactgattatacatacttttatttgtgacaaagcagagtcagaaattatctttaactactccatgggaatatactaccaagttacaaatacagattttaacttttactatgggatgagtattgctacacttgcgggagatgcattcatgaaaaactatacactggtagctccacttgtgccattaagttactcttgtgcagctagatttgcaatttctgctagaggcttccacacgaactttctccagttgccacattcagcaataaccctgacgttaggacgaagagagggaagtaaagcgagaaattgaagctccgattttgagaggacctttgcttcgaggacccatacaacaagacccttggcactagggggaagagcagcgagcctgtaatcaacttctggtggataataccatcttgctataggttgtttcccaagatgagcagggcaaacagggtagttcttgagaagggtagtctcagggtcaccaaggccacgagcagagatgtcaagaaagtagtagccctgcattttgagacggttaagataacga

SEQ ID NO: 262 - DNA, 573 bp, Arabidopsis thaliana
tggatcgtgtggtcttcttcttcctcatcgccgccacgttactagcagtttctctcggatccgccgtaatctccgtcgaggtaaacgacggtttcgttaacccgatcaggcaagtcgtcccggaggagaacgatgaacaactcctcaacgcagaacatcacttcactctattcaaatccaagtacgagaagacttacgcgactcaggtagagcacgatcatcggttccgtgtcttcaaagctaacctaagacgagctaggcgtaaccagcttctagatccgtctgccgtccacggcgtcacgcagttctcagatcttactccgaaagaattccgccgcaagttcttaggactgaaacgccgagggtttcgtcttcctactgatacacagacggcgcctattcttccgactagcgatcttccgacggagttcgattggcgtgaacaaggagccgtcacacctgttaaaaaccagggtatgtgtggttcatgctggtcatttagtgcgataggagctcttgaaggagcacattttctagccactaaagagcttgttagcctcagtgagcagcagc

SEQ ID NO: 263 - DNA, 573 bp, Arabidopsis thaliana
gtccgaaaaccatcttaaagcaactacacaaatcttgaaattttctcatattttctatttactatataaacttttaatcaaatcaagattaactatggctgaggagtacaagaacaacgttcccgagcacgagacaccaacggtcgcaacagaggaatcaccagcgacgacaacagaggttacggatcgtggattgtttgatttcttggggaagaaggaagaggaagtgaaacctcaagagacaacgacgctcgagtctgagttcgatcataaggctcagatctctgaaccggagttagctgcggagcacgaggaagtgaaggagaacaagattactctgctagaggagcttcaagaaaagaccgaggaagatgaggagaacaagcctagtgtcatcgaaaagcttcaccgatccaacagctcttcttcctcttcgagcgatgaagaaggtgaggaaaagaaggagaagaagaagaagatcgttgaaggagaggaagataagaaaggactagtggagaagatcaaggagaagctcccaggacaccacgacaagacagcagaggatgatgtacc

SEQ ID NO: 264 - DNA, 573 bp, Arabidopsis thaliana
cttttttttttttttttttttttttttttcaaacaaacaaattggacaattttattgacaaccaaacaaagtggaccatataagatctctccaaaatcaactcatataaatgctaaatcaatggagatgtaatgtgtttacatgtgtgtatctttacgtgatcaactgatttgggcagagttcatgctccaagcatttaagtttaagacatcaacactttgatatccataattaatagcaaagagatgtgaactttttcctattgccaattttggatacactcttgaggtaatgcatgctcttccctttccaccgaaactctccactactgaatgatcaatcaaggctctgagggatagtggttggtgaggattaatatccacaaaagctccgtatgtcgttttgtcattatcttccttcagcgaagatctgctttggtcactgcacatgagcacaacgtacttattgctgttttgacgggctttgaagattctaaaataaacagatgtgtactcttccaaattcttagatgccaaaaccattaaaccgaatggacctaaaccagacttaacc

SEQ ID NO: 265 - DNA, 573 bp, Arabidopsis thaliana
tttttttttttttaggcaaacaacatgtttaaattttatataattagaacgagaatatctttcaacatctgtttgtgcgacaaagagaataaaccagaccaatcacattggttgtttttaaaaaattagatcaaataataacacgacgtcttaaaaaatgcctcatctcgattgtaacctcataaaaccgtagacaaatggattaattcttaaaaacggtgggaaacgaaaacttaaaaaaacacagaagaaaaaagaacacacaacactctactgatagcttacgccttcaccgttgacaacctctcctacgcgatacgcaacatagtctccattcttgacttcttctagtattcgtgaagctgcctctggactaaccaccataaccatccctatccccaggttaaacgtccttctcatctcactgtcttctattctcccagtctgttgaatccacttgaacaacggtggaagttcccaagcatcggtgtgaataacagcacccaaaccgtccgggaagactcggggaatgttgtctgtgaaacctccgcctgtgatatgagctaaaccttt

SEQ ID NO: 266 - DNA, 573 bp, Arabidopsis thaliana
  misc_feature (1)...(573): n = A,T,C or G
ccacaagtttatatgctaatcattcaaagtttcaatcgtaaacaaacattttcgtttcttttacaaaaaaataaaaatacaatgactgacattatttnnnnctcaaatacaatgattgagaagtttaattaaacngagattagcaaaagttaacaacctggaattgatcatcatcatcatcaatcatcttcaccttcatcaatcgtccatcgtagctgtttattagatctgctcggttcatccgtcgcagcattatccaccggtaaatctgatgccagatttgagagcgaagaagacgaagaaagcgattggagattagaagaagacgacgatgaggagaagagattcatagccatgatgttgccttcgctccaagannttcggatcgggaacgagatgctctctgagcttccgtggcggcgacaagacggcggccgtcgctgattttgatttttcccagcgccacttgatttatcgtgaagagcacatccgcagtttttgtggtaaggacgccgttcgatggcggaatcaaggccggagatacaaccctcgaagatgctgcggaatattccg

SEQ ID NO: 267 - DNA, 573 bp, Arabidopsis thaliana
tttttttttgtagataactgaacgtactttatttaatactcattatatcgaaaccgatatatgatgagcataacaacatatcacagcatattccaaaacaaacagttacagagaatagaaactccacaagaccccatttattatattgattatcgaaaagacaccataatagtaaaccaatcgagatagtgatgatgaataattgatgatggttaagctttggtgacgtgaccttcaatgtcaacaaccatttgcttgacgaatttcatgtagccgcttggttcgggaaagtcatcgttgcgcttctcccatatcatagtgattttgcagacgcagctatcctcagatttgggaataaattcgtagatgatatcaaatactttgagatgctccatcacgtgaccatccagtcctcttttcgtcaatgttttattctcatcatctatctctctcttctctttgaacatctccttctttccatcatatgtgtagtcccaactcctgatagacccgtgagagtcatgttcgccttcgtgaacaacgacattttggatgtggtggccaatggcgtca

SEQ ID NO: 268 - DNA, 573 bp, Arabidopsis thaliana
ttttttttctgagtaaaacaaaacctttaaaatatgaagagatctttacatgaaataaaacaaccaaaggtattttactgcgttctccatgacgccaaacaatccaagaaattgtataaaaaaactttagaagatagaaaacctcaaactgttacttgtcgcaaacaagttgtactcttcaccaactgtgttctctttctccttcttgctattgccggttggatcaccaaaaacatgatctcctgagaactgcaacgagaaatcctccaaaatcccatctttggatcgagcaggattcgctttacttcctgtggacagagcaaccgggccaccaaagtggaacaaggagaagttctcatcactatcagtttgtggacatcttttccttggagtttccattaaaggcatttcgttaaatctcctctcatttgcttccttcaaaaaactgtgttccaatggctcaagaggttgagcttggtcaacagtgttcattgtgttggtttcagcaaacggatggaaaattggaactggcccggaattgaagaaaggagctgctgaatggttcaatggggt

SEQ ID NO: 269 - DNA, 572 bp, Arabidopsis thaliana
tttaccgtacaaaaccaaatgctaaatgaatattaaaattcgacaagccagattgcaattaagagtgtacacacgtttaagatggaattgtaaagtccagtaaccaaaggtagaattgaaaataccaagagataaccaaatagagtatcttgaatcaaaaagacaatcaaaatatatcacttagattccaattcggcagatcggattccgtttaataagatcgagatccaccttgtgtccaaacaaatctcggatgttgtcgataccgtataatatcattgttggtctttcaagagagagaccccaagcgatgactctaacatcctcggggagacccatcggtagaagcatttcgggtctgaacatcccagagtttccaatctccacccacttccctaaaccttcatggtagctgaaaatctccatgcttggctctgtgtaagggttgtaagctggcttgaaacgcaatttcgacatccctaagcgtgagaagaagtcttctaatacaccaatcaggtctccaagtgtaaggccccgatcacatatcaaaccttcaatttgatggaactctg

SEQ ID NO: 270 - DNA, 572 bp, Arabidopsis thaliana
  misc_feature (1)...(572): n = A,T,C or G
ctttattgatcatcaagttaaccagcacattctattggcttttcttctatgaatgagaataacccttttattcttcttctcttcttgctcttgtgtgtatatatcgttcaactctcagctagctgctgatgcgatttctatcgccggctcaggaacaacatcggatggagagaaaccgtttgttttcggatagtgcttcccctctagtccccagtattttgcggttttgagatcgtcttcatacatttgtcgtgagaaatcttcatgatcatactctagtgttgcttcacctccgaattccttggggagattctcaacgtcaaaatgtgtcgtcatcagttcatcacttgctttgtcttttgggtacacaaatttcaccttttcagctgtacgtgggtccaagaagtacttagcagccctgtagactgcttggaagagtcttggtggattgtagagaaaggcgataccgagtctctcagggtaatagttctgtagaatgtgaatgatttnnngtgttgttttcataggaggattaacagccatagaccaaccagtgaaatcaatgagccaag

SEQ ID NO: 271 - DNA, 572 bp, Arabidopsis thaliana
cgcgtccgtcaaactctgctagcgaagtcacaatatcactcgaagatggctaatcacaacagtagtaggcacacaatcatcttgttgcagaattctccgagcagagctacgaggactttcatggactatgactctataggccaagctatggatggtatttgcggcttatatgaaaggaagttgaaggaaattaacccttctctcagaaatattagctatgacattgctgacctttacaattttattgatggtcttgctgacttgagcgctttggtctatgaccactcgataagtgcatatctgccatatgacaggcaatggattaagcagaaggcatttcaccatctgaagagaattgccaatggaggcagatgaagaagaagcatcatatgaaattgtcttacctgaagaaacatatgttgagagaggccatttaaagcatcatcactcgttattatatatatttgccaatgtaacattaattaatatgcatagaaagagttgtggttctcttggatgtgttagccactaaaagtatctttgctatccaaaaaaaaaaaaaaaaaaaaaaa

SEQ ID NO: 272 - DNA, 572 bp, Arabidopsis thaliana
atgcacttggccaaatatatactagcaaagatgtgtacaaccagtaaactagagatatatctctattacagtactggttcatgatcagtgattgttatagatgaccaatacacatttctcagaaaaaatgacaaggaacataaaacacaacacaagcttttattgatcccatacatgtaatgacagaggaagaataggcagtcccctgccttcttgggtataaaagccccaatatacaaataaacaatagatgattgttgtatacgtgtatatatgaatatgagagttggtaagtggtaatcaatccatcatcttctctggaaattgaaagctttaatggcgaatgcaaacacaagggagaagaagacgcaaaaggcgacaaccataatagctgagacacctaagaagtcatgtttatatcccatcacatcctcaagcagttgtttcaccatcacctgatggataccgtccgatagcttcaccgatctttcatcatcaccgtactgagacaccaatagaccgtacagtgtccaagccaccgggtttgcccagtagtaccatctccaccacag

SEQ ID NO: 273 - DNA, 572 bp, Arabidopsis thaliana
cttttttttttttttttttttttttttttttttttttttttttttttttttttttgttgactgaatattagacattacaaaagcttgagttttgttttatatgcgattaataataaacacaccagaggatataagctaagttactaagagagttaggctgagaaagagatattacagacaaaaacgacgacgtaggaagacaatagacccagagagagagaacaccagagtagtagcagttgtcacagtatcagtgatttgttggttattaccaatcttcttccttgttttgttgtcacactgtcttctaattcagtagtaatgttgctgatggtggaattggtggtgttgatgatggtgtgggtggtaaactggaggagctggagcaggaactggaccattacaataaccgttgtacgctgggtaaccgataggagagccttggtatgagcctgggatgatctccggagagtatggataaggtgggcttctgttgctgtagactgttgtaggtggggatgggtaagctgctggtgaagcgtattgaggagagtgagagggtgatctgatga

SEQ ID NO: 274 - DNA, 572 bp, Arabidopsis thaliana
ccacgcgtccgttctttctctcttctatctgtgaacaaggcacattagaactcttcttttcaacttttttaggtgtatatagatgaatctagaaatagttttatagttggaaattaattgaagagagagagatattactacaccaatcttttcaagaggtcctaacgaattacccacaatccaggaaacccttattgaaattcaattcatttctttctttctgtgtttgtgattttcccgggaaatatttttgggtatatgtctctctgtttttgctttcctttttcataggagtcatgtgtttcttcttgtcttcctagcttcttctaataaagtccttctcttgtgaaaatctctcgaattttcatttttgttccattggagctatcttatagatcacaaccagagaaaaagatcaaatctttaccgttaatggaggaagtatctccggcgatcgcaggtcctttcaggccattctccgaaacccagatggatttcaccgggatcagattgggtaaaggttactgcaataaccaatactcaaatcaagattccgagaacggagatctaat

SEQ ID NO: 275 - DNA, 572 bp, Arabidopsis thaliana
ccacgcgtccgcgaaaaaataaaagaggaatcaatttttcatatatagccaaagtcacatagtgattcttctccaatcaaatctctatcaacaatgacaagcttgcacaaaaccctcttcacacaaaatcccactactttagatcaactcatgatgtgccacacgggaagagacaattcatggaaaaaactagaaaacatagacgaagaaggtccatcgacggtggcacgtgaagtgaggacggcgttaccaccggagacgccaacggagatgatggagttcttggggagatcatggagcatttccgccgtcgaactcacgagagcttttttcaacaattccactgccgacactaactcttttcttctatctactatcgttaacaccaacaaagaagacagagaagatgaagaagattctacttccatggcttcttctcgtgaccttctgctgccacatgtgggaaataagaccagccctccaataactccaagaaccggtagagaaatgaagcatttgtacaagagcatgataagaggaagaacaatgggaagaagattaaaggatcagaa

SEQ ID NO: 276 - DNA, 572 bp, Arabidopsis thaliana
ccacgcgtccgcgaagatgctcaacagatcaaaagtcgtttgttcttcttcatcttctgtaatggatccgtataagactcttaagatccgacccgattcatctgaatacgaggtcaagaaagctttcagacaactcgctaaaaagtatcatcctgatgtttgtagaggaagcaattgtggggtacagtttcagacaattaacgaagcttacgatattgtgttgaagcaaattaaaaatcagatggaagggacggaggaatttgagccgttcgatgtatacgacgagggattgaacggaatgaatgatccagattgcgacacgtgggaagaatggatgggatgggagggagcaggaacccgtgattactcctctcacgttaatccttacgcttgataaacgaatgatttcactaattaatttcgaaagaaatcatccaaatgtgtataaataacaatcagagagagactaaaagcacaacaatgtaaataagtgaaatttgtctcggataatgattgcttaaatgtgaataaagtaatctctcctttgtgtaaaaaaagaaaaaaaaaaaaaa

SEQ ID NO: 277 - DNA, 572 bp, Arabidopsis thaliana
gtaaatcaaattaaaagtctgtatcattccgacttatgaaaacgattcaagaacgtaacttataagtctatttggacaatgcgactttaattagcagacaggatattacaatttcggttgaagaaagatattaaagttacagtaagtgtaagtaccgttacaacaactagtcaaccactgattcatctacttcccgcctgaccgtcaagatataagttgttgttgatagaatgtgttccatctctttgttgtgttctctgacctgttcttgggatgatcagaggtctgaagaaaactaaggcgaaaagtaattccataatgaacaaactcatgctgatccagacaaacaaagttttcctccagttccatatgatccttttcaagaaaggaagtttggattcaaggaacagagatgcatcgtaaatctcaggaatacctgctccaggacgaaactctgcacgttgttcgatcatgatcttcaagcaagcagtaggaataatgtccttttcgaccaagcctttaagcttcaagttcaaggtttggatttcagagacatagcccgtgacaagcgg

SEQ ID NO: 278 - DNA, 572 bp, Arabidopsis thaliana
  misc_feature (1)...(572): n = A,T,C or G
tctagagcggccgccctttttttttttttttttttgaaaaaaccatatatcattaatttatcacatcataaacagagagttataagtttgatgtcaaatcatagtttgttgtgagaaaagaaaaaaaaaaacataaaccttaaacatatatggggtcatcaacatatcacttactactacaacatttgacaacttgttccttcggatcatgcatgagttttacttttacaaacagattctgcaaactttaaaagaagtttctaatctcttctgaaaccgaacaaggtttttattagttacctccaagcacaagaagtgataagaggttgattcttccatcctaaatacaatgctccatctctttcttcaagtgtatacttctctgaataactctcaagcaatcctttgattgttgcgttcacatacgagctcaaaggatacggtttaaatcccgccatgtgnnnncgagacctccatttccctagtggctcgtgcctctcttctctttcaacaccttcacaagctataagattcacaacctctctagccaaacaatgctgctcaacattgat

SEQ ID NO: 279 - DNA, 571 bp, Arabidopsis thaliana
  misc_feature (1)...(571): n = A,T,C or G
tcgagcggccgcccgggcaggtaccccatgttctagctatcctttcttcctttggatgcttataaatctcaatatcgctgaggatagcgacggggttaccatcggaattgaaaagagcgacacgtgtagactcgccgatacgtgctttttgttcatcgtcaatagcgagaacaataggcacggacatgttaacgacggagccgtcgtcaagacgtagcgagttaaaatgaagagtttggaggaactcggattctctcatgaaacctccgagtggacttgcccagccttcgcttaatacatgcatccattgcaagtcaatcgccgtcagctcaacacgtggcaaatccgccgcctcgtgtttcttctnnnnncgctttggcnnttccacgatgagctctacaagcttaccaccgtcgggagcgattaatccggctcggattgatcctacgcggnggcgtagggatttngaagggaaggaaaccgcggcgaaggggagatcggagtttggagatgatttggttagtggttgagagaggaatggagttttgcttaagacggcagccattgaagc

SEQ ID NO: 280 - DNA, 571 bp, Arabidopsis thaliana
taaatgatcttctcctccgatcattagtctctttaatctttctcagcctcttcttgttcgtgatctctcttcctccggaaaaagatgtcggccggtaacggaaatgctactaacggtgacggagggtttagtttccctaaaggaccggtgatgccgaagataacgaccggagcagcaaagagaggtagcggagtctgccacgacgatagtggtccgacggtgaatgccacaaccatcgatgagcttcattcgttacagaagaaacgttctgctcctaccacaccgatcaaccaaaacgccgccgctgcttttgccgccgtctccgaggaggagcgtcagaagattcagcttcaatctatcagtgcatcgttagcatcgttaacgagagagtcaggaccaaaggtggtgagaggagatccggcggagaagaagaccgatggttcaactactccggcgtacgctcacggccaacatcattctatcttttctccggctactggtgctgtcagtgatagctccttgaagtttactcacgtcctctacaatctttcgcctgcagagctttatgagc

SEQ ID NO: 281 - DNA, 571 bp, Arabidopsis thaliana
cggccgccttttttatgtttgactttgcagtgttgtgtagtacaaatgtaacaaaaacccagagagacacattctcatcagatcacactttaaaaacttataaaccctttcccaaaaataaatatcccttgatgactcctacccaactcccccccaacaagcttattccatgactcaaacccaccaaccactggatctgaccggaccaggccagactaagtaaggcaccccatctgacttttacacagaagaccagactctctaatcataccctttttaaccagtgcccccaaactctttaagctccttcgactcttcaaatcgtcatgttcagctccttcactggaagttgaatccacctggtggtacggctgcatcattacctcctccaaactggaagccttgtgcagagggatcaccaggtggtaaagtttcatcttcctcttccaaccagtacgtttcaagaatcttcactgccttctcatagatttcgctgttgtcatgactctgcagattctcaatcttttctaatccctcagcatcatcgatcagctgtgcataaaagtttaca

SEQ ID NO: 282 - DNA, 571 bp, Arabidopsis thaliana
tagcgtaccgagagattggtgggtcgaggatctcgctgagctcagcattgatttatttaaaagagtggtttcgactattagacgaaaaggcggtgttttgcctgaggttatcggagaagctcttgaggtatatgcagcaaagagaatccctggtttcatgattcaaaacgatgataatgatgatgaagaagatgtgatggaacaaagatctttgttggagacattggtttcgatgttgcctagtgagaaacagagtgtttcttgtggattcttgatcaagctgttgaaatcctctgtttctttcgaatgtggagaagaagagaggaaagagttaagtagaagaatcggagagaagctagaggaagcaaatgtgggtgatctcttgatcagagctccagagggaggtgaaacagtctatgacattgacattgttgaaaccttaatcgatgagtttgttacacaaacagagaaaagagacgagcttgactgttcagacgacatcaacgacagttcaaaagcaaatgtcgccaagttaatcgatggatacttagctgaaatctccagaatcgaa

SEQ ID NO: 283 - DNA, 571 bp, Arabidopsis thaliana
gtgacgaagttataatttaatcatcattatcatccaacattacacaaaattgataagagggtacaagagagcctccataagtttgttcaaggaaagaaaatggaaaacacagaaaagccacctattatagtgtagaaaacatcagcggaagaagatagtaatgaaattataagacggagtttagtttctttttatatagaaaggagaagttgggttccagttttcaatatctctggcctctaccaccactgcctcctcttcctctgccaccaccaccgccaaaccgatttcctccaccaccaccaaaccgatttcctctgccaccaccaccgaatcttttttgtggcaatggttctctctcctggagtttaggcatcaccttaaccacttccaaactcatacttccagcactcttttgtgctcctgcaatgaacaagtctagatctgattgcttaacatcgaacacagctcctgttttatctgctgttagagataacccttcaatcatttccaccttgtcatccggtaaaactctccttagcagtccataaacaaatgatggcgagtatat

SEQ ID NO: 284 - DNA, 571 bp, Arabidopsis thaliana
atgcaatatatatttatattttttgaaaagaaaatggtgtggaaaatattgcaatcgttcgtacgtatatttttacaaaatattaaaaccaagcccatgcaaaacacatatacaccaaagtcaactttctttttcaaaagtcaccgaaccagaggttataaaactttcactcaagaagaggaaccagaactcggaggagcagaggaggaagaagaaaaaggttcttgatctgcgcatgacagcttctcgtgaggaccagcttcttctcgtccaacacctatcagatcaagataatacaaataatgagaaacaatgttgttcatctcatcgttatcgaatccgctgttgcagatttgatcgccgtaaagaacgtttatggtggctccaaaccccggagttcgttttgcagcagtgtcattctttgttggcttccattttccgacgaaaacatcgtgcgccgacggtaaatgcttcttcggtggcgtcatccaccgccaaatcgccgcttgaaacgctaacgtagcattgttctcgagatactctggatgactcagtagatccggacgcgtgg

SEQ ID NO: 285 - DNA, 571 bp, Arabidopsis thaliana
ctttttttttttttttcttgttaatacccgcgacttggactgcatttaccattgagatcagaaaagtcacaaacgtcacggaaccgtaaaaatttgaaagaaacaaaaaaaattaaaaagctttttagttgtctttgcagtttctggtataaccagaggatgatgataatcttgactgtgattggaaaaactcgaatggagttccagggccaaatgagcgtcgtgttgcgtttggagaatctgatagcaatggctcatagaccgggcttctgttcttgggctgagtgatggatattggagacaagtccttttcaatggtccttggttgcgtttcgatgtttcctagtgtcagtattggaccacccattcgttcagcttgctggagtatattgattttgctgggtctgtatgtgtagcggaagtacttcaatgcgaaaataggacccatgcctgctccaactatgagaaacattgttatccagtaagaaggttgagaacagaggcggaacatgatggtgtacattcccgatgacggtattgcgctgaagagaaagttgattcggacgcgtgg

SEQ ID NO: 286 - DNA, 571 bp, Arabidopsis thaliana
  misc_feature (1)...(571): n = A,T,C or G
gcccgggcaggtgattaccaaacgtcgtcaatacatttcttcaaattacgtttctttattctttcgttactnnnaacaaattttgatatctgattggtgttgattccaagtaagaaagatcaaaactttaggtaaagtatggatatgggtttccatgaaaatgagcaaaatcaagaatttgcgaatctaatggagattggatctgggcattacgggtgttcacattatagaagacgatgcaagattagagcaccatgttgtgatgagatttttgattgcagacattgccacaacgaagctaaggattctcttcatattgaacagcatcatagacatgagcttcctcgacatgaagtttcaaaggtcatatgctcgctttgtgagacagaacaagacgttcagcaaaactgctccaattgtggtgtatgtatggggaagtacttctgttcaaaatgcaagttcttcgacgatgatctttccaagaagcaatatcactgtgatgagtgtgggatttgcaggaccggaggagaagaaaacttcttccattgcaaaagatgccgatgttgctact

SEQ ID NO: 287 - DNA, 571 bp, Arabidopsis thaliana
ttataaccggtaaatatactaacatgggactcaataatgaatcaatgataatacataacatgtgaacaaaaaatactttttgtttttctttaaatattaaataagttaagccaaaagcaaacaaatctcgagaatttattgagctaataataataaaaccgggtaaaggaattcagaagaagatggatgagatcaaagacaagatcacggtggtgactccataaccggcgagcttgttcccagctccggcgtcttttttggtattccctgctggagctggaggaggtaaagaagcttttggcgatggagctcctttagcggtacaagcggagagatcagtggtgacgttgcaacgacggctaagaccgagagctttctcagtggtgacgttgaactgagcgagcaaacctggactggtgtagattgtacagagacatgtaagttccttctccaccgcttctttaatcgagtcgcaacattctttcaccggcgttgttgtcgtgttcaggtcgttgaagcaagggactagcttgctcacgcactcagtttgtgcttcaatagtcggcggccg

SEQ ID NO: 288 - DNA, 571 bp, Arabidopsis thaliana
ttttttttttttttttaaacttctaaagaaacataatatttacatttttacatagataccaaaatattagcccagaggcccaaactttgtatgaaacagagtaacttacctttaaatctttaatttaccccaacaaaaataataaactttttgtataacatattcgaaagaagaagccaaagccaacaactatattacatttcatacaagattttcaaatgaatatgaaaatccgatcatcttctcagagaaagggattgtctggaagctggcatggagataaagtgtatgtagtcggagagtctgcttaactagcctcctctcttaccgtctccgtcgtagttgttctgtttccctgatccgactagatcacccgcgatcattttcttgattcggcctctcctcggagtcggtgccatcgaggtttccgatctgactagatcacgaaagatcatgatcttgactcggcctctcttcggaggaacagttgattcctcctttcttgagctgtaaggagatggaagctccatggtcgcagttgtagtatcttaagatctgtgtgaaaaaaaga

SEQ ID NO: 289 - DNA, 571 bp, Arabidopsis thaliana
gcggccgcgttcggacaaaaagattcagggtgatattgatgagagtaaggtcaaagcaccaaacatgttcgaacgagctaaagaagagcttgatgctgttatcggagctattcatcaacgcaagagttcaaaggataaaatggaattcaaatcagataaaccagaagatggaaagaaaaaaccgaatatgttgaaaaaggcgagggaagacctcaaatctttattcctgaaggaaaaacctcctcgccatcttcatcatcatcacaaagaaactcatggaaggagtgatgatatcagtgagaacacaccggtggatgaagtgaaggctcctaatgttttggagagagccaaggaagaaatcgaagccgtcatcgacaccatccattccaagaagaaggagaaagacggttctggttcaccttcgcgttctcggtctctctcaccggaaaaggagagagctggattcgcatgctctattggaaaggggttggaaaagatatgttctccttggagtgatgataaaaaggattaatttattcttatgattgatgatcataaaacttggcggccg

SEQ ID NO: 290 - DNA, 571 bp, Arabidopsis thaliana
  misc_feature (1)...(571): n = A,T,C or G
ccacgcgtccgttcttcttcttcttcttcttcctcagagaaattctgtgttgttgtatacagagagatgttctcatcttctacactcgtttattctctatctctcttcctctctctttctcttctcttcttcctcttcatcctctcaccacacatccttctctcttcctctaccctcatttccaccgccgatgacctagacgacctctctctcttccaccgcgccgtcgtctcttcctccaccaacaacaaccgtcgtctcatctccctctctccaaatccacccccaaagatcgctttcctcttcctaacaaactccgatctaaccttcttacctctctgggaaagctnnntccaaggtcaccaagatctctacaacgtttacatccacgcagatccaacctcctccgtctctcctcttctcgattcttcatcaatcaacgctaagttcatcccggcgagaagaaccgcacgagcttctccgacgttaatctccgccgaacgacgattactagcaaacgcaatcctcgacgatcctaacaatctctatttcgctttaatctcacaacact

SEQ ID NO: 291 - DNA, 570 bp, Arabidopsis thaliana
aaaccctttgatgaacaatttgttgattccaaggatttcgatggtgaagctctggagaaatttgtcaaagaatccagcattccacttatcaccgtctttgacaaagatccaaacaaccacccatatgttatcaagttctttgaaagcactaataccaaggcgatgttgttcattaacttcactggagaaggagctgagtctcttaaatcaaagtaccgtgaagttgctacatccaacaagggacagggtcttagcttccttctaggtgatgctgagaacagccaaggtgcattccagtactttggactcgaagagagccaagttcctctcatcatcatccagactgctgacgacaagaaatacctgaaaacaaatgttgaggttgaccagattgaatcatgggtcaaggacttcaaggatggaaaaattgctccccacaaaaaatctcaacctatcccagccgaaaacaacgagccagtgaaggttgttgtttctgacagccttgacgacattgtcttaaactctggaaagaacgttttgcttgaattctatgctccatggtgtggacac

SEQ ID NO: 292 - DNA, 570 bp, Arabidopsis thaliana
  misc_feature (1)...(570): n = A,T,C or G
ccacgcgtccgcgcttctcttctcctccgctcctcctcctcctcctccagatccactctcactctctccgcttcctcctctctctccttcgtcagatctctcgtctcttctccacgtctctcttcttcttcacccctctctcagaagaaatgtcgaattgcgtcggtgaatcggagtttcaactccaccaccgccgctactaaatcttcatcttcagatcctgatcagttgaagaacgctagagaagatatcaaagagcttctcagcaccaaattctgccatccgattttggttagattaggttggcatgatgctggtacgtataacaagaacattaaggaatggccacaaagaggtggagctaatggaagtttgagattcgatattgagcttaaacatgctgctaatgctggtcttgtgaatgctttaaacttgattaaggatatcaaagagaaatactctgggatcagttatgctgatttnnnccagttagctagtgctactgctatagaggnagctggaggaccgaaaataccgatgaaatatggtagagttgatgcctctggtcct

SEQ ID NO: 293 - DNA, 570 bp, Arabidopsis thaliana
  misc_feature (1)...(570): n = A,T,C or G
ccacgcgtccgcttttaacacttgttcttttaaggcaaaaaggctcgagccacagagatctgagtttctcttcttcgagatctgatcgccgaatctcataatctcccatcgaagcagaatggagacttttctattcacatctgagtctgtaaacgagggacacccagacaagctctgtgaccagatctctgatgcagtcctcgatgcctgccttgaacaagaccctgacagcaaagttgcttgtgagacatgcaccaagaccaacatggtcatggtctttggtgagatcactaccaaggctactgttgactacgagaagattgtccgtgacacctgtcgcgccattggatttgtctctgatgatgttggtcttgatgctgacaaatgcaaagtcctagtcaacattgagcaacagagcccagacattgctcaaggagttcacggtcacttcaccaaatgtcctgaagaaattggagccggtnaccaannncacatgtttggttatgccactgatgaaacccctgagttaatgcccctgagccatgttcttgccaccaagctcggtgctcg

SEQ ID NO: 294 - DNA, 570 bp, Arabidopsis thaliana
tattgaacatagaacgcaaatcaaaatttacataaaccaatatatgaaattaaaattgtcttcttcgttttgcactttggagcgtttaacagttgtagaatccattagtctcccataattaatatgtttaaggataaatggttaggcaatttcgggagtttcccaaaggtttttctccgatatgactacatcgatgcaaaatccgaaatgcttcctctaaatacttgaaacttggttcgatccttaaaccctccaaatctttgtttaaccgtctgagtccctgtcaaggaacggtaacggtacggtcttcactgccctaaattggccgacattgtttaagtgctcattctccactctgtaaaagttccagtggcctcgacgaatgacttcaagtgacgccaagaagaaatctagcaaatgagactgaacaggactgaccctgaatctcataattgtctcgatccaagcaactcgcaacaccaaattcaacgcaatggagaggtagtagaagttcttgttccggagaaccaaattgtctcttagccatggatttttcgatttagggtttag

SEQ ID NO: 295 - DNA, 570 bp, Arabidopsis thaliana
ctttttttttttttttttttttttttataacaaattcgtttcaattcatttatctgaaactggacattataagttcttgaaaattatgtataaaacccacatataaaaagggaaaagaatttaaaaaacaaacaaaaaaatagtgaatataaacggtatttttttccttgttctctgtcttggttttgtgtgtgtctagctgatctgttctccgatcaaatccaaccctacaaccaagaaagacagtccctgaaacaacaaaaagtagaagtgaagaccgtgcgccgatagaaagctccttgcagctgcggttagcagcaagaacgcaagcccgagctctttcttgaacaccatgttcgtcttcttcttgttcttcggcctcattagccctccaaggctcttcttcacggtttcttgccctacaagatttgtctcttgctccttaagtttgctcagaagctccaaacctgactccgagtttctcctatgcaacttctcttccttttcagcaaacgctagcaaatcggactccgatgatctcccggttttcttcgtcacaacccactcgta

SEQ ID NO: 296 - DNA, 570 bp, Arabidopsis thaliana
agatctgcttctgcaaaaaaccttatcctgctatggcttccactttcgtctgctctctaccaaatcctttctttgcttttccggtcaaagcaactactccttcgacggctaactatacgcttctcggaagtcgaagaggttgtcttagaatcaaagcgatttccactaaatgggaaccgacaaaggttgttcctcaggcagacagagttcttgttcgtcttgaagatcttcctattaaatcctcaggtggagtattgttgcctaaagcagctgtgaagtttgagagatacctaacaggagagattatatctgttggttctgaggttggacaacaagttggacctggaaagagggttttgttctctgatgtgagcgcttatgaggtcgatttgggaaccgatgctaggcattgcttctgtaaagagagtgacttgttggccctcgttgagtgaagtcttgtccaagagggagagatttgaagattttacaagttttctgtaattttcagacagcaattgttgtttctagttaatccttcaatttaatatcaattgagatcactttcagaaa

SEQ ID NO: 297 - DNA, 570 bp, Arabidopsis thaliana
tttttttttatcatgtaaatgttggcaaaggcccaacaaaaatatatgacgatggatagtaataaattacatatagtcatcatcattatccatatcgcaccacatttggaacattaaattctctctattattcagagagattatcacagcaaagaaaaacacaaagtctcattttattcttcttaataatagtagatctttctttcttttcgacaacatcattcagagtttggtttttctaaaagataggaccagcagcgagaatctcctccgtaagcttaccatccacaccaatcttatggttagcaaaaacctcgaagttcttcttgaacagacctcccagtttcaccagagtatctttgtgtgccttcttatcagaccaggagttgacggggtccaagatctctgaaggtatcccttcgatctcagttgggatttcaaatccaaagatttcggttttcttgtagtttgccttcaagagactgcccgaatggattgcatcgatgatctttctagtgtatgccagcttgattctgtttccaacaccataactgccaccagaccaaccag

SEQ ID NO: 298 - DNA, 570 bp, Arabidopsis thaliana
ccacgcgtccggaagattaaggaatcgtccaatttcagagaagttccggttgtaatcatgtcgtcggagaatgtattgaccagaatcgacagatgccttgaggaaggtgctcaagatttcttattgaaaccggtgaaactcgccgacgtgaaacgtctgagaagtcatttaactaaagacgttaaactttccaacggaaacaaacggaagcttccggaagattctagttccgttaactcttcgcttcctccaccgtcacctccgttgactatctcgcctgaatcgtcgccgccgttgactgtttcgactgaatcgtcggattcgtctccgccgttttctccggtggagatcttttccacctcgccactttcatctccgatagacgatgaagatgatgacgtgttgacgtcgtcgtcggaggaatcgccgattcgacggcagaagatgaggagtcccggattagattagtggaactattctgggatgccgtgtaatattatctatctccgttaacttcgtttttacctctgacggtgtttttaattgcacgttgacttgacgccgtaaaat

SEQ ID NO: 299 - DNA, 570 bp, Arabidopsis thaliana
ccacgcgtccgggcaaagtttggctactactaacaatcctaccgatggacctgcccgtactcaatcacttcctccgcccactgcaacagattatgaccgtccaattaatcagatcaacgaccaccatataacaaccactaataatccgccacgtcacgatctgtatccttatcctgcacaaggctattatgcgccgcaagtcatgtatggcgtaagttataacgttgctcaacctccggtgagtgtagacgctgcgtcgtattatacacctccaccaccgtattcgtatgcgtacatgcacaacggttatcaaccgtccgatcaaaacccttgtcaacctcggccgtcagattcgtttgagttattcagcgatgagaatccaaacggttgtgcgataatgtgatgtcaaattaccaaaaggaccttgaactctgcttatacgccttgtatgacttaaggatggtttcgtaatttgaagttctttcacgtgcaagttaaaaaaaaaaaaaaaaaaaaaaaaaaaaaaaaaaaaaaaaaaaaaaaaaaaaaaaaaaaaaaaaaaaaaaaaag

SEQ ID NO: 300 - DNA, 570 bp, Arabidopsis thaliana
gaatccaattcaatgagtcttcttcgtcttctcctcgttgttgttgttcttcatctttctgcggtggccggcgacgacgccatcgtctccagattccaggagtacctccgaatcaacacggttcagcccaacccggaatactacaaagccgttgactttataatatctcaggcgaaaccactgtccctcgaatctcagacgatcgaatttgtaaaaggaaagccgcttctcctcctcaaatgggttggctccgacccaaccctacctgcctttctcctcaactcccacaccgatgtcgttcccttcgaggactccaagtggactcaccatccgctccaagctcacatggaccaccatggcgacatctatgccaggggttcccaggacatgaagtgcgtcgggatgcagtacctcgaggccatacgcaagctccaggcttctggcttcaagccactccgatccgtctatctctccttcgtccccgatgaagagattggcggccacgatggcgcagagaagtttgctgaatcccaattattcaagagcttgaacatcgcaatcgtgctcgac

SEQ ID NO: 301 - DNA, 570 bp, Arabidopsis thaliana
tggcttaaaaatcaaaggtctatcagttgattgcaatagagaatataatgatgtcttacaagacaaacagaggtagagacagagtttaaccacgtcgtacacaagcaattcacttaggccacaattcaatctttcaagaagaaggagccttggtcttagtgtagtaccgaatgccgaaagccaagcctaagattagaagtggaacaaggaactgaaggagcttaataacaaaatccgagctcttatcctgagtagccacggctttcgtcgacgtaggaggcacaaacttagctttaaccggcacagtagctgtgtcaatatcacccacatagtactcatctagcatggctttcgcagtcgaactatgtcccacatcctcgaaatcatcggtcgcatctttccctgtagaagtcaagataacctcatcaccaccaggatgatcatccaagaactttgtcacatcataaaccttgccgtcgatgacgatccaacaatccttggcgctactgtgctgagaaacctcggacaaggtgaaaacttttccgtctccgcccatctccgatgatctgt

SEQ ID NO: 302 - DNA, 570 bp, Arabidopsis thaliana
cttttttttttttttttttttttttttttttttcattacaaggatcgttcacgtgcttgtttagctggaaacaactacaaaactcaacaaagtacaataaatttaggataagagagagttgatgcctttgtcttccgctggcacatgggttacataacatcagaattcgtaatgatacacgacacccatttcccattaagcaaaaaaataaatagaaagattaaataaatataataaatctccatcgaataaaaaaagaagaagaaccaaaaaaagaaatatacaaagggttggtggccgaaacttttgtgaggaggaggaggacatgaaatggtggtggtggtggttgcaagcaagcaaggtggtagtagcagatatagttacaaggggattcaaatgagccattgttgttgtgttttcttttttcttacggtgcagttccccaagttgttgttggtgttttactactccactctgttcttcctctcaccacttccgctccatcctggagtcggagcaaatgctgacattccacatcccccgctgttgccaggttaccgatatcgcaac

SEQ ID NO: 303 - DNA, 570 bp, Arabidopsis thaliana
tttttttaatgagaaacatcaccacaagtcaatcttacaattttaaaccccctagggggtgacaaagatagagtctaaaaaaatatcttgcacctaaaacacgaatcactgagtaatagaaacaaacccccaaaaaaaggtcaaagcaaaaaggagccaaccatatgagataactagagaaggtccctaatgtttaaatctacattaaacccaattaattaaccaaacaagacactaatttatccccaaaaagatctctgttttcttagcttttccaatcctcaaaatcgaattgagaagcttcggaatacggtagtagagatacggtcggggaaattaatctctccttgaactctttcctgttttcaaaaacctatgattacaaaaaatccagcccattgaacacaggaagcttcttcttgttgcacccttcttaattttatgagtccaccatctcgtcttgaatctcattaggagcaataagcccaggaattgaaagcattctttgacgttctctctctctctgtgcagctgcttcctcagcatagagatctttgttatcctgagcgg

SEQ ID NO: 304 - DNA, 570 bp, Arabidopsis thaliana
  misc_feature (1)...(570): n = A,T,C or G
ggatcctctagagcggccgcccttttttttttttttttttttttttattcatgtaatgagaattattgtttgaaagctaaacagaaagtatcgactattcaataaacagaaacattattaagccttattcgtcgaaaactaaatgtttgtgctttccgcactctaaagcttgcggttgatgacattaacaggaacaaggtgaagaggatgcttcctgtggctagtgagaccaggtgcttcttcaacactcacttcctcagtcgctttccaatcaaaatgatacaaaagattcgccaatgtgtactccaccgtacttaatcccacgtacattgcgggacaanntctgcgtccactcccaaacggcaacagctcaaaacttgtccctttagtttccacattgctatcaacaaatctctctggtataaactcatcaggatccttccatacatcagggttacgtccaatagcccaagcattgacatgaatacgcgttccagggtaaatatcataacccttgatcttgaagttagtcattgcttctcttggaatcagaataggactcggtgcgtg

SEQ ID NO: 305 - DNA, 569 bp, Arabidopsis thaliana
ctcatagctgtaaccctccaggcccagaggatgcttctcactcccacacatgcttccacgctcacactcatctcatcatctctcaggatcagcaagagaatgatcattctgacagtagcaacaagaaacggttatgtggtaatagagaggcagtgaggaagtacagggagaagaagaaggctcgcactgcataccttgaagatgaagtgatgagattgcaatctctgaatgagcaattccttagaaaacttcagagccaagaaatggtggaaactgaattgatcagactccgggctcttctggtagagatgcaggggaaaattgaagttgaactttgtagtttctcgtttcagaaacaatgcaacggttctggttttgtgttcaaagaagatggatgcaacttagcaacaagtaatatgatgtgtgaagcggcaagagtggagtgcgaggagggccaaacacttcatgatcctattcaatcttttgttcctcaaccaccaccattctcacgttaagcgtttacgggctgtggtattgtgtgtatatatatacatatgggtttaattagg

SEQ ID NO: 306 - DNA, 569 bp, Arabidopsis thaliana
ggcacatcagttctcaacactcacgatggcgagaattaaggttcatgagcttagagataaatcaaagaccgatcttcagaatcagttgaaggaattcaaggctgaactcgctctcctccgtgtcgctaaagtcaccggaggcgctcccaacaagctctccaaaatcaaggttgtgaggaaatccattgctcaggtgttgacagtgatctctcagaaacagaaatctgctttaagagaagcatacaagaacaagaagctcttgcctcttgatctccgtcccaagaaaacacgagctatccgtagacgtctcaccaagcatcaggcttcgttgaagacagagcgtgagaagaagaaggagatgtatttcccagtgaggaagtacgctatcaaagtgtagtttcattctcccagctctagcttctagaaatgaatgattcagcctttgattatcggcttatgttatctcctctttttttgtccaaccttattaattttagttgtactgaagttttgttatcacacaacctctctaaaatcattagtatttcataaaaaaaaaaaaaaaaaag

SEQ ID NO: 307 - DNA, 569 bp, Arabidopsis thaliana
gtttacaaatgccaatcggattttctgctcattcacaccccatgcatagtggtctaacccaagagtgagggctcattaatgagtatacagatcggcccattaacaacatggcccttttaacaaacccgacaggacttttttctttttaatgaaaacatacaaccagagcccaatttcaatgatcaatcagaaggactgaactgatccctgaccccattggacggccaccggactcttaacaacgtgttcaccgtctgtccattcgatcgacccgaattcatgacccggcacggatccgactcctccgccgagcacaacgctcttaaatgtgacttcatactccaacacgctcttctccttgctgaacgcaagcttgcttggagaaacatcaatctcaacattcgccggagatttaactccgacttcgtacacagcgtcgacattgcttcccacgtttttgacaacccttttgtatttcacaacttccccggtcgatgcgaaaaccacggagaaagatgggtaattgagatcgccggcggttcttagcttgctcgtttcacatgcgtcgt

SEQ ID NO: 308 - DNA, 569 bp, Arabidopsis thaliana
tatgcttcccggagttgagtgtgcaaggaggcggcgcttccacggtggtgctcctccgattgaatcctcgaacacagcttctgtggcggctgcggcgggacacgtctggacacggcgaccatcgttctctctttacactaccaatcatgagagccaccaggcccatgtctccttctcggagagaagtgttaggaataaatcttatggagaagacaacgatgagaaacttgacggagcagccaaagaggcaaagcagaggcttaacaagcggctgagaatcccaccacgtacaaggttcgatttagtaaaaaacggcgtgtgatagtaaaaccaactcgtaaatttaccttaaaatgcaccgaagaagcttcaagcctttagctttatttgtcatgataatgacgcatgatgatgtattctaattcataacatgtggtatcacatgagcaatactattgtgagattgtcttttgtcggacaattatttcattatctctttagtgttaaccccactttgtgtcttgtgagcgcattttagcaagttctcgctatttattgttaaaaaaaaa

SEQ ID NO: 309 - DNA, 569 bp, Arabidopsis thaliana
cttttttttttttttttttttttttttacgtaaacaattcaagcaacaaaacaaaattcttctgatggattcagaaagaacgtcactttttccagtgttcttgccttacggcagagaaattttaaggcagaaacaataacttcaaaactcatgaagagccgtttttttgctttttcttttattctaatcgtaaaacaagaaaacaagaagaattcgaggctataaaaaaggctcccaaaagaagattcgataaagaattggattttacgatgttcagagatgatcacagattgcctttgtgaattccgtggtggtcgaactacctccaagatccgcggttctgtatttgccctctgctatggtgttgatgattgcactgtggatttgttctgcttgttcgttgagcttcaagtgacgcaacatcatcactccactcagaagcaacgcggttgggttcgccaagttctttccagcgatatcaggtgcagaaccgtgaactgcttcagcaagggctacaccatcttctccaatattacaacttggagtcaatcctagtcctccaaccaatc

SEQ ID NO: 310 - DNA, 569 bp, Arabidopsis thaliana
cttttttttttttttttttttttttttttttttgaaacacgagacgggtcttttcttttatttagataaaaacgttgtccaagagttttagaagagcaatgacatcacaaagttttgttgcataaagatcccagaagcaataaacataaagggttgtttaataatctacccacagtttaggagctggggagatcattactgcacgctcagtacttcgatttcaaagtcgagaacagagtttggctggatcccccatgccggaaatccaccagcgccatatgcgtaatccgatgagcaccgcaagcgagcaacctctccaatttgcattccgataacgccttcatcccatcctttgatcacagcacctttaccgatttggaacgagaaaggtttttgtccctcgtcctttgtactccagaacttctgggatagatcaccatctttcccgaatccggtgcaatggacggtgacggtttggcccggagcgggtttgggaccgttgccgggtctgatgacttgcttctccacacccatctctatatcttctctctgtctctccggacgcgtgg

SEQ ID NO: 311 - DNA, 569 bp, Arabidopsis thaliana
  misc_feature (1)...(569): n = A,T,C or G
cattttcttgccatcagtggtggattggtacagagtctcctcgaacaggatagctccggagatgtactgtccaagtcctggagccgacacaagcaacgtcctgtaagcttgacggttagcctccgtgttctctagcccaattgacgccaaacgctttccacaagtcgcgttggactcatccatcgccataattccgtgtcccggagacgcgattgttttagcggttttgacgagctcatcggcgtaagcagaagcggcacggacggtgagagcggaaggtgccacgtggctgcgaatagctgagacagaggaaggttgacggaggagaagactctgtcccttaacccaatcagatttcaccggtgaggctttgagcatagtcgcagtgcttgacgccattgttgctagtacttgcttgctagtgagagcttaaaacgctacctgcccgggcggccgctcgacacccaaggttttggtgggaagatactaagcaattcgaatcgatgaatnnnnnnnnnttgaacgctgcgtgtcagaggatgctgaggctgaaggaacgtttgaatctc

SEQ ID NO: 312 - DNA, 569 bp, Arabidopsis thaliana
  misc_feature (1)...(569): n = A,T,C or G
tttttttttttttttttttttttttttttttttttttacacacaatccaccacaccacataacattaactttacttagcatcaaaaatacagagcagacacatgctactgcttcagtttcattttggcattattacattcggatttcgaatgtgtgtgttcgactttcccattttcccaagctctttccatttagacccagaaccagagacactccacaacttgtcaccaggctttgccgaacccaattttggtttcataagaggaagcttgttgttcccttttcccattccgttagccatcaaccaccttgaaccagactgcacctgctgctgctgagtcgtgattccccatggcttcttatctgtctcgctcttcataccggtaagatgtacctctgtgattttgtactgaggtattccttgttcctccatgggtntctcttctttctttgcatcactcgcgtccgcttcctcctcttcatctgttttcctcagctctgaaactgtgctgtagattttgggctttggagggacgaacaatctctcaacttggataagagaaagcata

SEQ ID NO: 313 - DNA, 569 bp, Arabidopsis thaliana
  misc_feature (1)...(569): n = A,T,C or G
ccacgcgtccgcttccctgaaactttcccgagaaaattctcaatcctctattttctcgagaaaattctcattctcattttctttcagggaaaagttttgttgttgaatacagatttggaaacttcatttgtttttttccgtttttaaccaaaatttttaaaaaagctttcttctgaacgttaatcgtggagagtttcgggtcgggtcgggtcgtaaaaggcgggtttcacggtggtgannnantcacctnntgcttccttctgagggggttagccccgaggctcttcgcctcggcgggtttcaaattcccccaaatctaacaaactcacagattcattttctccattttttttgtttgttgaaaatttgaatccacaaattttgaattcatttgtaaccgttcgttgaagaagaagaagatgcctgctctagcttttgttgatactcccatcgataccttttccagtatctttacaccgtcgtctgtttccaccgccgttgttgacggttcctgccattggtctccgtccctctcctcctctctttaccgtatcgacggatggggagct

SEQ ID NO: 314 - DNA, 568 bp, Arabidopsis thaliana
ccacgcgtccgatcgaagaaaacttttagcttacaaaatctgctttgagttgtattgatttatcaattcgtatggaaaatcctccattagaatctgagatcaaagaggatatgtctttgaagaattatcctccagacaaggataaggacaaagacactatcatggaacaacctagtagtccacgtcatcggaaggttgttgctagatggttacctgatgaagcacagaggccaattatcgatgacgctcccgtattcactccatcactagaggagtttgtagatccacttgcgtatatcgagaagatacgtccactagcagagccgtatggtatctgtcgaatcatcccaccatcgacatggaagcctccttgccggcttaaggagaagagtatatgggagcagacaaagtttcctactcggattcaaaccgtagacctgcttcagaaccgtgagccgatgaagaagaaaccgaagagtagaaagcggaaacggagaagaaactcgagaatgggttcgtctaagagacgatctggttcttctcccgctgaatcgacttcatcacccga

SEQ ID NO: 315 - DNA, 568 bp, Arabidopsis thaliana
  misc_feature (1)...(568): n = A,T,C or G
ccgactggagctagaattcaggttattcctttacatttgccccctggagacccaacgccagaacggactttgcagattgatgggataaccgaacagattgaacatgctaaacaattagttaatgaaatcatcagtggcgagaaccgtatgagaaactcagcaatgggtggaggctatccacaacaaggtggttatcaagcccgcccaccctcaagctgggcaccacctggtggtccgccagcacaacctggttatggtggttacatgcaaccaggagcatatccaggtccacctcagtatggtcaatcaccttacggaagttaccctcaacaaacttcagctggttactatgatcagtcctctgtgccaccatcccagcagagcgcgcaaggtgagtatgattattacggtcagcaacagtctcagcaaccaagcagtggtggtagctcagccccaccaacagataccacagggtacaattactaccagcatgcttctggttatggcnangctggtcagggataccagcaagatgggtatggagcttacaatgcctcgcagcaatcgg

SEQ ID NO: 316 - DNA, 568 bp, Arabidopsis thaliana
ccacgcgtccgggccttcaccgcttttctcctcctcctctcttccatcgccgccggcttcctcctcctactccgccgtacacgttaccgtcggatgggtcttcctccgggaagccttggtctccctctgataggagagacttttcagctgatcggagcttacaaaacagagaaccctgagcctttcatcgacgagagagtagcccggtacggttcggttttcatgacgcatctttttggtgaaccgacgattttctcagctgacccggaaacgaaccggtttgttcttcagaacgaagggaagctttttgagtgttcttatcctgcttccatttgtaaccttttggggaaacactctctgcttcttatgaaaggttctttgcataaacgtatgcactctctcaccatgagctttgctaattcttcaatcattaaagaccatctcatgcttgatattgaccggttagtccggtttaatcttgattcttggtcctctcgtgttctcctcatggaagaagccaaaaagataacgtttgagctaacggtgaagcagttgatgagctttgatc

SEQ ID NO: 317 - DNA, 568 bp, Arabidopsis thaliana
cttttttttttttttttttttttattaagaaatcagtacattgagaatcagagtttacaaatatcaagtgctgaccttttttaactcttaaggagaagcaggttcaacaacaactacacacactttgcaaagcaactgaagaataatcaagcagccgctacaaccaaatatttaatgcacaaaaatatacaagagcttgagagaagactcactgatgaactataagccatgagtgtgcccatacacgagacagatagagagatcacagaaggtttagggttaccagaatttcccaacagacaagtaacgagatcccaacagcaacgatcaaagcagaacatctggctcggttaaactacctgaaaagttaactttacaacattttgggaactccaaaccagcttcactgcatctcacttctgtcacatgtggaagagaccttacatctatatactccagggaactgcatttgtccaaaagcttgcctatccctgttactgtgatctttgtgcagttgctaacctttaaaaccttcaatcccaaaacatcgtcgctccctaaatcccgg

SEQ ID NO: 318 - DNA, 568 bp, Arabidopsis thaliana
cgcgtccgaatcgattgcttaatcatttctgccgttggattgaatcgaaaaagggcgaattatttaaaaagcttcagaatttgaaatcgaaatctgtgagtactgttgtgtttgtggaagagagagttttggggtttaataatggcgaaagctggagggatcacgaacgcagtaaacgtaggaatcgctgttcaagcagattgggagaatcgagaatttatctcacatatctctcttaatgttcgtcgtctcttcgaattccttgttcaatttgaatcaaccacaaagagcaagttggcttctttgaatgagaagttggatctgttggaacgtcgcttggaaatgctggaggtgcaagtaagtaccgcgacagcaaatccttctctgtttgcgacgtgaaacaccgtagacgatatcgaaatcgaaaccgagcctgatcctttggctttaacagaagaagtctgttgttgaatgtgtaccattgaatgattctttctttcttcacatagctgtggtagtaagtaaactagtagcttaaaatatgaatctattcataaatatgtgtatc

SEQ ID NO: 319 - DNA, 568 bp, Arabidopsis thaliana
gcaaatctctctgtttcttttggttcaataaattacttttctcagttttaaagatgtaaaagaaaaacatgcttaggatttcgagggataagaagaatctcactttgccatcatgactttgacgaactcttcatagttgatctgaccatcaccatcgacatcagcctctcggatcatctcatcgacttcctcatccgtcaacttctccccaagatttgtcatcacgtgacgaagctcagccgccgagatgaaaccgttctggtccttgtcaaaaaccctgaaggcttccttaagctcttcctctgaatcagtgtctttcatcttacgtgccattaggttcaggaactcagggaaatctattgtcccgttcccgtctgcatccacttcattgatcatatcctggagctcggcttctgtcgggttctgcccaagtgatctcatcacagtcccaagctcctttgtggtgatacaaccatctccgtctttgtcgaataggctaaaagcttccttgaactcggagatctggtcatcggttagctgatccgccattttgtcttcttcggatttt

SEQ ID NO: 320 - DNA, 568 bp, Arabidopsis thaliana
ctttttttttttttttttttttagcaaatttaaacttcattaacaagcaagtggttcacaaaagaaacagagaaaatctagtttgacttttattggcacacaagagaagatacagatggaagcaaagacgcaatgtaactaaagatgaagagtctctataggagaaactgaacatctcttttattttggcgtctcttaagaagaaatggagaatgttcaagcctcgaaggtcatggcttccgcttctttccttgtcgcatcgaaaagtaccgttgatagatacctctccccgaaactcgggaatatcgccacaaatagcttcccagcgttttctggcctctgtgcaagtttaattgctgcagcagctgctgcaccggatgatattcccacaagaagaccttctttaagagcaagctgccttgccatgtcaatggattcatcacttgaaacctgaacaacttcgtcaataagatcaacattcaatacacttggtataaaaccagctcctatcccttgaatcttgtgaggacctggcttcccaccggatagaatagcactttcaactggc

SEQ ID NO: 321 - DNA, 568 bp, Arabidopsis thaliana
gagccacatttgacatttccacgaagtgatttagtaaaacattaaatggaagaaaaaaaaaggttacaacaggcaaaattggatttaaattaaccatctttaaaagttacatcctcagaacaaagcatggccatgttgtccttcctctaatttcttctgcttcttctttctctttttctccatctttgtatctcctcgtgatgccatacgttttgcttgctgtgaccttatctccaatagcttggcctttgcatctttgaagggagcatcagatcttgcatccatcatttgcttgacatgatccatggcggccaaattgaaaccgattgtatctttgcatgccttgatttctgagtaaagaatgtccctgagaacgcttaagattggtctggcagatggtgttgttaccaactggttgtgatgtgtctgtaatataatggttgcgattctgctaaccaactctaccttttcgggaattaaactccagtctttcatgtagcaaagaaacttcaaagaatctgagaatggtagagccagcaaagtctgctcaagatcatttgttctcaca

SEQ ID NO: 322 - DNA, 567 bp, Arabidopsis thaliana
  misc_feature (1)...(567): n = A,T,C or G
cttttttttttttttttttttcaatgtatcatgttagattttttttgtacaagtcataagatcttacaacttacaagataaatagggatcatcatcatctaatgggaccataattatgaatannataagaaaacgattacacttgtctccaacatattttcatgacaaggtttcaatcttcttctctgtcgtgtgaaggcaataaaagtgattgctcagaatcacttactgttttggttgaatcctctcttgctttgccccaaatcacagtgtaaaacccaaagctcaatatcactgatccaatcacactcccaagatgaagtgtgtcgccgaggaatatagcagccatggcgactgcaattgcgatagacagcggcttgaacaaggatatgtagactggacccttcacatggagaccccatgtgtggataacgagtatatgactgnnncgagggagaaacccggtttaagctgccaagaattcaagtctttttctacaagtagacatactgtccctgagattagagttgcgcataagttgtagcagaagactacggctatttcttc

SEQ ID NO: 323 - DNA, 567 bp, Arabidopsis thaliana
ttttttttgttctaaaatgaggtgagaaatggattcaacacattattctctcctaattactacaatacagacgcaatataccgaaatgtatgttctaaaatgaggtgagaaatggattcatcacattattctctcctaattaccacaatacagatgtaatattagtttaactgaaacgacagaaccaaccataatgggtccagttacttgaggaagacgtaacctgacacaatcagcacaaatgtgaggattccagctacgaaacaaaccctttttggtaattttccatcgtctatcctcaacaccatagcctcatagatcggcaagcagttcaccaccgcgaaactcgccagcatcagctcaaggacgagtccttctccccaagcgaaaagaccataaagcccccagacaaaagcaaggaggttaacgatggcaaccgtagtcaagggcaagaacatggacgaagaggggccgaactcaaaaatctctttctcatacctcttgctttgttcttcgtcatcgttggctttgcttgtgacgttgaatccatgcgtggagaggtttagg

SEQ ID NO: 324 - DNA, 567 bp, Arabidopsis thaliana
  misc_feature (1)...(567): n = A,T,C or G
tcatttttgttttcttttagagttcacaagttcttcgttgttcagctactcccactgtcataacacgaagtgggtttttttctgatcaaagaacaaaaacaaaaatggatatctccgccttgtttctcactctcttcgccggaagtctcttcctttactttctccggtgtctaatctctcagcgccgctttggatcttccaaactcccactccctccgggaacaatgggttggccttacgtcggagaaactttccagctttactctcaagaccctaatgtctttttccaatcaaaacagaaaaggtatggatcggtgtttaagactcatgtattgggatgtccatgtgtgatgatctcgagtccagaggctgctaagttcgtgctggtgacgaaatctcatctctttaaaccaacttttccggcgagtaaagagaggatgttggggaaacaagccatcttcttccaccagggtgattatcacgctaaactcnnnaagcttgttcttcgtgcttttatgcctgaatctatcagaaacatggttcctgatattgaatccatcgctcaag

SEQ ID NO: 325 - DNA, 567 bp, Arabidopsis thaliana
  misc_feature (1)...(567): n = A,T,C or G
gctagatttcttcaatttgtcactggaacatcaaaggttcctttggaaggcttcaaggcactgcaaggtatttctggccctcaaagattacaaatccacaaagcatatggagccccagagcggctgccatcagctcatacatgttttaaccaactagacctccctgagtatcaatctaaggaacagcttcaggaacgcctgctacttgcaattcacgaagccagtgaaggttttgggtttgcttgaagaaagcttgtcgaaaccaacccccgtcaccttaagaatcagtgaaaacccatcaatccttcattcttttgactcctctgtacatatctcgaagattttcaggcaggataaggagaaagagcttttgattaagactgcagaatgaatagaaatcgcaagtggctatttttgtctgtccatattatgttagtattagtctatttattattagggtttctctctgtccccttagnatttttatatcaaaaatcttttgaaatagttgcaaactctcaaatattagtagttgatatttgctaaaaaaaaaaaaaaaaaaaaaaa

SEQ ID NO: 326 - DNA, 567 bp, Arabidopsis thaliana
  misc_feature (1)...(567): n = A,T,C or G
ccgctacgagacaatcctcaactcgcaaaaagtcggcgactttcttatcgcaatcgcttatttctcgatcccaatcgagctggtttacttcgtgagccgcaccaatgtgccttcaccttacaattgggtggtctgcgagtttatagccttcattgttctctgcggcatgacccatttgctcgctggtttcacctacgggcctcactggccttgggtcatgacagctgtcactgtcttcaagatgctgactggtatcgtctctttcctcacggcactctcgttagtcactctcttaccattgcttcttaaggctaaggttcgtgagnttatgttgagtaagaagaccagagagcttgatcgtgaggttgggatcattatgaagcagactgagacgagtttgcatgttcgtatgctcactaccaagattaggacgtctcttgatcgacacaccattctatacactacgcttgnnnagttgtccaagactctggggctcaagaactgtgcggtttggatcccgaatgagatcaagacggagatgaatcttactcatgagttaagaccgag

SEQ ID NO: 327 - DNA, 567 bp, Arabidopsis thaliana
cgcggccgcaagaagaacaggaagaagagaggtcacgtcagcgccggacatggacgtatcggtaagcaccgtaagcatcccggaggtcgtggtaacgctggaggtatgcatcaccacaggatcctcttcgacaagtaccatccaggttacttcggtaaagttggtatgaggtatttccacaagctgaggaacaagttcttctgcccaatcgttaacctcgacaagctttggtcactcgtccctgaagatgtgaaggcgaaatcaaccaaggacaatgttccgttgatcgatgtgactcaacatggtttcttcaaggttttgggtaaaggtcatttgcctgagaacaagccgttcgttgtgaaggcgaagcttatttcgaagactgctgagaagaagattaaggaagctggtggtgctgttgtgcttactgcttaagttaggtgaatttatttgcttaactctgtttttgaatcttctatggagttttatcatcttttgttgtcttttggattttggaaagagcgagatctctttaaagttagtagttttatgaaccttttgttggat

SEQ ID NO: 328 - DNA, 567 bp, Arabidopsis thaliana
tcgtctagcctgcagtctacactgcaatcagcaccatctccttcactagcttcagagatggcacctccgttgctgtcaaacaaagctcctattactgctcctcctaccctacctcaggatactaatttgctttcgttttctctatctactacgagagccacagaagcaagtactggccttccactgtctaacaagcctagtgtagtaactggtccaatttctccgccgcagacaacaccattaacatctgctcctgttgcgggagtttctagttccattagccaagataagccaaaacctttgttggttactcctggtcaactgctgcagtctggatcttctgcagttgaccaggagtaaccaacctccaatattgccattgccttcctctgcaagaccaactcagaagccaaacgggcattctttcccaaatcataatggttacaggggacgtggaagaggacgaggaagaggagcagggagatcacaccaagtaatgaaattcactgaagattttgatttcacagcaatgaacgaaaagttcaataaggatgaagtatggggtca

SEQ ID NO: 329 - DNA, 567 bp, Arabidopsis thaliana
  misc_feature (1)...(567): n = A,T,C or G
cggctctcggtggaggaatttgccatacttattgggaaacacttttgctcattttatccacaggtttttactgctatcgtgaatatcattgagaagccctgggagcgtgtctccatcgatggaaaaccacatttacatggttttaagcttgggtcagagaaccatactacagaggcaagagtagaaaagtctggtgcattaaacttaacttccggtattggaggactagctctactgaagacaacccagtcaggatttgagaggtttgtcagagacaaatacaccattctgcctgaaactcgtgagcgaatgctggccacagaggttaatgcatcttggaggtactcgtatgagtcagttgcaagcattccaacaaaaggactctactttagcgagaagttcatggacgttaagaaagttctgatggatactttctttgntnnaccagaaactnntgtgtatagcccttctgnnnnacgcactctctacctcatgggaagcgccgtactgaaaaggttcgctgatgtatcatcgattcacctaaaaatgccaaatattcattttcta

SEQ ID NO: 330 - DNA, 567 bp, Arabidopsis thaliana
  misc_feature (1)...(567): n = A,T,C or G
cgtatgtccagcgagacacaggtggctccaccagaagagatcagaagaaaacgatcatttaaccgcttgggtatacaacatggttaagaactcgggctctgtcgatttccggttcatgaccaggcattactgtggaaatgcaatcaagaagcttatgttcgggacgagaacgttctctaagaacactgcacctgacggtggacccaccgtagaagatgtagagcacatggaagcaatgtttgaagcattagggtttacgttcgctttttgcatctctgattatctgccgatgctcactggacttgatcttaacggtcacgagaagattatgagagaatcaagtgcgattatggacaagtatcatgacccaatcatcgacgagaggatcaagatgtggagagaaggaaagagaactcaaatcgaagattttcttgatattttcatctctatcaaagacgaacaaggcaacccattgcttaccgccgatgaaatcaaacccaccatnnnnnngcttgtaatggcggcgccagacaatccatcgaacgccgtggaatgggccatggcgga

SEQ ID NO: 331 - DNA, 567 bp, Arabidopsis thaliana
tccggagagagctaaagatcaaagctttagaatggtgagactaaacagagtgctgctaaaagacgccggcaatgtaattgacaagaccctctccgagattctggtgtgccctctctctaagcaacctctgaggttttgcgagaagacgaaatcacttgtcagcgatactattggtgtctcttttcctatcaaagatgggattccatgcttggttccaaaggatggaaaaatacttgaggaggaaggtgatgcatcaaaagcttaatgacttttgcttttgcacccaaaaagaaataaaatggtcagagtgaaggtatcagcttgtatctgcagcaacttatcaatggttcgttctgtcctctgtactagttacctgatcatctcttctaaactctcttttaggcttgtggccaagttctggtagcatttttaagtatgaatgtttgatgggaaacattgatgtaaccaattgaaaaacattataggtgtgtagtttcaggtgaataaaccaactttttcgtttaaagtttcttgaagtctaggattcttattgactggaatgaaagt

SEQ ID NO: 332 - DNA, 567 bp, Arabidopsis thaliana
  misc_feature (1)...(567): n = A,T,C or G
acaacttccaacgatcacacacaaatggcgatgacgtcagcagctaccggatttattctcacggccaacgtcccggcggcaataggcggtggttcttcaaagagcaccaccattgtgtctttcttgccgatgagaagcttcggttcaaggctagtagtcagagcggcggaagatacacctccggcaaccgcctcgtcggatagttcttccaccaccgctgctgctgctccggcgaaagttccggccgctaaggctaaacctcctccaattggcccaaagagaggatccaaggtcaagattctaaggaaagaatcatactggtacaagaacgttggatcagttgtggccgttgatcaggacccgaagacccgatatccggttgtggtccggttcgccaaggtgaattacgcgaatatatcgaccaacaactacgcattggacgaggtggaagaagtaaaatgagagacatggtttatctctannnnngttcgtctgtttgtaatcttaaacaaaaccgtatgtaccaaaaagttaaccaacaattcatcttttatcttttacaatctc

SEQ ID NO: 333 - DNA, 567 bp, Arabidopsis thaliana
  misc_feature (1)...(567): n = A,T,C or G
tctagagcggccgccctttttttttttttttttttttcttggacagaaattttttcaatataaaggtaatcagaaaatacaaacttaaagaaagacaccatgtacaagtctcatagtcatagatatacaacaactgaaacatgaatacaaacaattttgngttttatctaatgactaatggtaccaaagctcaatggagcttggtattgttgaagcttcagttgatttcatacaccattctctctgaaagctcagcgcccacaaccttgcggtagctttgtaacatcggttccagttgcttcctgcctacgggagtaatgatctgccgcatttccttgtatctatattgggatccataaagaccgataaggatgttgttaatgtcgttatctttggatccagggtctgactcaatatgagagtcctctgattcagtctcatacattnnntcatcatcatcatcatcatcatcatcatcctcatcctcatcttcatcctcatcactgcagcccataaagttatcattcgtctccccttgttccatgtcttcatgttcacttgctgctg

SEQ ID NO: 334 - DNA, 567 bp, Arabidopsis thaliana
cgtccgagactctgaaatgtgcgttatctcttcttgctttgacaaggatatggaaaaatgaaggtgttactgacgacaacaggttaagcacaacatttgatgaagttaaagtctttccaattcccgcagcattgtatctttttaagaatttgttacaggtggggtgtcctgagtttgttatttttttctgtggctttggtcgatttttcttaacttatgtttttcatgttaatatgtctctaactacttgttgtgtcaccttttacgtggcagtattatatttttgcatatgtagacgccccaggctatcagatattgaagaacttgaacatcataagtaccggtgtcttgtacagaattatactgaagagaaagtaggtttttttaatcatccaaatggatttaacagcttccaatgaatagttgttctggaaatccatcagtgagctgtttcagtttccttcaattcttgcaagtgtgaactgctttgcttactatcttctctaacagattgagcgagattcagtgggcgggtttcattctattgtgttgcggatgcaccactgc

SEQ ID NO: 335 - DNA, 566 bp, Arabidopsis thaliana
atcgaagagtggatcaaccggagatagacttaaagaaactcaagcaatcaacaaaagtttgtcgtcgctaggcgatgtcatattcgccttagcaaagaaagaagatcatgtaccattccgaaactcaaagctcacatatcttctccagccttgcttaggcggtgacgcaaagacgctaatgtttgtgaacattgcaccggaatcttcttcaaccggtgagtctctctgctctcttagattcgcagcgagagtgaatgcttgcgagattggaacaccacgtaggcagactaacatcaaaccattggaaaatcggttgagccttggatgagggaaagaaaagagagatggatttgaagtttgaagctaaaagcttcatttcaaagttaattatatgaatgtacttaatatggtcacaacttgatgaagaaggatgggatgattctaacaagaaaacatgaagaccttttgttgtaatttgtatagtttggtttagcattttattatctgttgtttatgtaattctttttcttttggatcataagtaggattttgcttgttgatgttcg

SEQ ID NO: 336 - DNA, 566 bp, Arabidopsis thaliana
gatcgagaacgctcacgaagattccgtttgggcagcgacgtgggttccggcgacggaagatcgaccggcgttgcttctgactggatctcttgacgagacggtgaagttatggcgaccggacgagctggatcttgtgcggactaatactggacactctttgggagtagcagctttggctgcgcatccttctgggattattgcagcatcttcttcgattgatagctttgtccgtgtgtttgatgttgatactaatgctacgattgctgttttggaagctcctccttctgaggtttggggaatgcaatttgaacctaagggtacgatccttgctgttgcaggtggaagtagtgcctcagtcaagctttgggacactgcaagctggagattaatctcaactctatcaatcccacgcccagatgcaccaaaaccttccgataaaaccagcagcaagaaattcgttctctcggtggcttggtctcctaatgggaaacgacttgcttgtggttcaatggatggtacgatctgtgtttttgatgttgaccgctcaaagctacttcaccagctag

SEQ ID NO: 337 - DNA, 566 bp, Arabidopsis thaliana
gaacttactgacttattcaactttgatcgatgggtactcgaaggggggtttgtataaagaggcaatggagatatttagggagtttaagagcgccggattaagagctgatgttgttttgtacagtgcattgattgatgcattgtgcaagaatgggttggtgggttctgctgtttctttgatcgatgagatgacaaaggaaggaattagtcctaatgttgtaacttataattccataatcgatgcctttggtcgttctgcaactatggacagatcagccgattatagcaatggtggatctttgcctttctcttcttctgctctgagtgcattgactgaaacagagggtaatcgggtaatacagttatttgggcagttaacaactgagagtaacaaccgaacgacgaaagattgtgaggagggtatgcaggagctctcctgtatattggaagttttccgcaaaatgcatcagctggaaattaaaccaaatgttgtaaccttttcagcgattctgaatgcttgcagtcggtgtaactcatttgaagatgcatcaatgctactagaggagc

SEQ ID NO: 338 - DNA, 566 bp, Arabidopsis thaliana
ccacgcgtccgcacttctcttgcatccttcaaactcatccacagcaaggaatggcgacagcagcagcaccagcagtgatttcatggacaagatcaggcattgtgtccaaatccggacaaacccagaagaaatctgagatgaaagtttcttacataactggacttaactcatatggtggtctcaaggcacagaacaacaaggttgtctcaatgggatcaccactctgcacagaacagtgttttgctaacgttgtgatgtctctcaaaggaagaagaggtaatggaggagccttatccaccacgtgtaacgctgtcggagagattttcaagattgcagcaatcatgaacgctcttactcttgttggtgttgcagttggattcgttcttcttcgaatcgaaacttctgttgaagaagctgaagcagagtaaatagagtaaattgctgctcttataattatatatttttggttattgttgttgtcaagctttggtaaaacttgatggatacatgttacatttgtttatgaagaagctcttttcttggtagatgaaaaaaaaaaaaaaaag

SEQ ID NO: 339 - DNA, 566 bp, Arabidopsis thaliana
cttttttttttttttttttttttttttttttttaatcgaaatatctttctcttgttgtaaataagatgatacagacaataatgagaatacagaaccaaacaaagcaaaacagagcatcctctgtttcgccgcaccaaataacagaaggaccagaataaaacacattcagttatcatgttgaagcaagccagtatctttgaatttctcctccactaagccatcaatacgagcagccatctcaggagtcaaataattagcccaatctccaacctttcctttcctaaaatacgcgctattcgcataaacagcaggacgatcctctctttctttatcacctttgttagcttcaagattcttcaacgtctcaaagctacaaagcttcaccactttctcagcaacaccattctcctcttcctcatcagtgaatccataacccatgaactcagccaatctcttcacaaaaggcaaaggattggccctcatggtctcgtacctaaggaacaaaatcctatctggattctcttggtaagctttccaataacccaaaacatgatccagataaggac

SEQ ID NO: 340 - DNA, 566 bp, Arabidopsis thaliana
ctttttttttttttttttttttttttttttaaaaaattacattttgagtatgaatattggaagagttaacttggtttaagtaaccaagatccaatctctaatttggtctaatcaaatagcaaaaacacatttgctctcaaatacaaaagtctaatctaaacagttggaacaaatgtgccaatataaccaactccagcaacaaaaaatgcacaagactgtaaaaacagataaacataaaagtatgatcctccatatgcgaaatcgtaacatccgcagaagaatatatataatccaacaacgagttctctccagttgagtctttgtccaaatctggtataaagcttagttgtagctttacctattaacttagacttgagagtgtcacctaatttttcagtaacaacccattcgttaacccgtcctgcctctagtaacccgatgaatgtcgcttttgtgcgatgcatcgacattacattctcgaataagatccaaaagacaagaagatggagtgatcgaggtgtagcgattgcgttaaggatagtgattgtagtaggaaaataaacagt

SEQ ID NO: 341 - DNA, 566 bp, Arabidopsis thaliana
  misc_feature (1)...(566): n = A,T,C or G
ctttttttttttttttttttttttttttttttttttttttttttttttttttttttttttttttttagttntaatcttgttgctaaatgaaacacgcaaaacaaaagtaaatagttacaaaggtattcctttatctcacaattgtctactaaacaacaatacagtgaagattaatttgtaaagatatagaaacgtagagatctttaaaaaggataaacagctaacagtgggatctagcgtgctcaggtttgtgagtgtactcataatcaagatgcacaaaagcccgttcgatctcctctagtagctcgagcttctcttgcagcgattctccaatgtcgtgagccacttgcagaggcatgtcagctgggagaacaatatcaacctccacaaaataatgagagccaaatgtgtatgccctcactgtgtcaatgtgcctaatggctttatggtggttccaacacaggtaagttagtttctgcagatactctggtctagctgatttcccaacaagagagttaacgttctccaagaccgtcattgaccatgtccgtattgtgtataatgca

SEQ ID NO: 342 - DNA, 566 bp, Arabidopsis thaliana
ttttttttttttttttttttttttttttttttttttaagaagaagcttaggttacgaggaacaaacacaatcagtaactcaaaactgttttatgtgtctatatacataaacatcatattcttcttcaaaacacacacagccaatagtccttgtttatgtggggaccaaagttgtttatgagtctgagtgcagaccagaactacagcttcttttgtccgaggaagataatgattcctttgtcatgaatctggaaattatgagtctggcaatgttctcaccagccactgcacttgtctccattgtgcttgccgcgttttcaaaagcattcacatagtacaagtgatggtcatctaatatgaatggtgcgaaaacttcaggcgcgtggtactttgggtatgcaccccagtctattcgaacggtttcggttctcctactgaagagctcatcaagcaacgaatctgatgcaggttgtcgcgtaaaaatcttgtatgtcatatctgttttactatatttccttagaattgagatgcatgagaatggaattagaggatcttcaagggttccca

SEQ ID NO: 343 - DNA, 566 bp, Arabidopsis thaliana
ttttttttttttttttttcgcaatttccatgttcttaaataactaggacacaatccatgaacatcgatagaaccggacagtgattactgattagtctttagttttccaccatgatgattacaaaagggtcaagtatgaaacattattttctcactgaaaaaaggatgtaaaaaaataagattgtacattgagttcaggtgaaaccagtaaaatagtcaggatgataaaagagcaaaatatgtctatctctacttcatccctaacaaagatataggccatcaaaagagaacaaaagaccgaccttttcaaatgctacttctctcaaaagactgtaaaattgctgacctgaacagttttgattgatcattcactgctctctgttggagccggtttctttccatactgctttttcccaaaagagaaagggacatatctgtatttgatcatatgctgtatctgtttcctcatcgtaaggaaaaacaacatcacccagtagaagagaagtattggccagaatacaggtacatcaaacacctcgaagaacgtcatcataaatccgatgatga

SEQ ID NO: 344 - DNA, 566 bp, Arabidopsis thaliana
  misc_feature (1)...(566): n = A,T,C or G
tcgagcggccgcccgggcaggtcaaaaatagtattttaagagatcgtcgcctacgatggcttcaaaagcattgccttttttaagtctcattgttgttcttcttatagcttctgaggtggtagccagagacctcgctgagaaatcggcagagcagaaaaacaatgaaagagacgaagtaaagcaaacggagcagtttggcgggtttccaggaggagggtatggagggttcccgggaggagggtatggaggaaaccctggtggaggatatggaaaccgtggtggtggatatagaaaccgtgatggaggatatggaaaccgcggtggaggatatggaaaccgaggaggaggatattgtcgctatggttgctgctacagaggctactacggtggctgcttcaggtgttgtgcttatgctggtcaggctgttcaaactcagccacagagtactgagccgggtcactaaaagtcgtaaaatgatgcatatatatcaatgattcctcannctgtataaagggaacaattaagatatagtaattactagggttgaaaaagtcattacaaagata

SEQ ID NO: 345 - DNA, 566 bp, Arabidopsis thaliana
  misc_feature (1)...(566): n = A,T,C or G
ctttttttttttttttttgattagattatccgaattttattctccatacagacaatcaattattcgaatcttgatttttttgttccaagtataataaaggtaacgtcacatcagaaatctatttatttcccaaacactaattgcacaaaaagcaaagtaaaaccactgtgatacaaattctataaagataaaaaaagtttatgctcaattaaataacgtaaagaaaactatattgacaaataaagacaacaacgacggaaataaacaactaaaaaccactttctttgatttcacacaattttagtgagtcaaaacgctgtgctgaagtagctactcaccacattctcacacagaatttggagaaccttagcattacttggcttcacacatcttggcatcttaaactgtccagccgatgaaccaagcccgagaaaatgttcttgaatcttccggaaagttccttttgcgacaactctcagctccaaggctccaatagtcttgcatttccggnnnctaacgtaacccgcatcgatgaatgctcggtctaaacagttgcagcaatcttg

SEQ ID NO: 346 - DNA, 565 bp, Arabidopsis thaliana
gaaagcttagacaatagacatcatatttattattaaaaatcacaagaaaaataaagatatgacaaggagtccatgtcaaagatcatataagaagacacctctccttaaggctaacaacagtatccttgagagattctttgataggagtgaactcaattcccaaacttttcaatttatcgacacacactttgtatgccatttcacccacctcattctcattatccttatcaacacggcacaaatcaggaaacagttcatgtaaaagcttttgaatgtctttcattgttacacctggatcagcaagtatgtatctgccactagcagaagggacctcgaacgctttgatgtgagcaagagaaacatctctcacgtccatgaacctatagtaaaaactattggaagggtttttaccatttatcagatccacaatcacttctacagagtaattaagagttggctgcaaaactggtccgatcacgtttcctggattcattacaaccaaatcgatcccgttttctttagcaaaccgccacgctgtttcctcagccaaagtttttgaatatcc

SEQ ID NO: 347 - DNA, 565 bp, Arabidopsis thaliana
cgaggtaccaaactctcaaagctctcttctcttctctagccttctctctctaacacatgagagaacaaaatcatcagctcacaatctcagccgtcgattatatcgccaccgtcgtagaagaagatggagaacactcaagatttctcgccaccacacatggatgcttctcggccgtcactaggattccctcttggcacagctctgcttcttatcatcattttcagcctctccggaatattctcttgttgttaccattgggacaaacatcgttctctccgccgctctttggccaatggtcgtccctccgccgacatcgagtctaatccttacaaacccaaacccccttttccggaaatgaagaaaccgcagaatctgagcgtaccggtgttaatgccaggagataatacacccaaattcatagcattgccgtgtccgtgtgcaccacctcgacctgaaaaactcaccgtagatgtccaaactccgccgcaatcaccgcctgttaagccggcgcgttttcctgttcctttgtattagatttaattagctataagataacgaacgaaag

SEQ ID NO: 348 - DNA, 565 bp, Arabidopsis thaliana
ccacgcgtccgtctcctcatttttcgtataattcgatttgcgaaaaatggtcgagggagagtccaaggcattgtggattattttggccaccgtgtttgcagtcgcggcggtggcaccagcggtgcatggacagcaaacgccgtgttacttcgtgtttggagactctgtcttcgacaacggtaacaacaatgccttgaacaccaaggccaaggtcaactatttaccttatggtatagattactttcaaggtccaaccggtcggtttagcaacggtcggaatattccagacgttatcgctgaactagcgggtttcaataacccaattccaccatttgccggagcatcacaggcacaagctaacatcggactcaactatgcttccggtgccggcggtatccgcgaagaaaccagcgaaaatatgggtgagagaatcagtttgagacagcaagtaaacaaccacttttccgctatcataaccgcggcggtgccactgagtcggttaaggcaatgtctatacacaatcaacatcggaagcaacgattacctcaacaactacttcttgtcg

SEQ ID NO: 349 - DNA, 565 bp, Arabidopsis thaliana
acgctcgttccaaagccaggtttgatggtactgctccagaaccccgtaagggaataagaagcggtcatatacctggaagcaaatgtatcccttttcctcagatgtttgattcttgtaacacattgttaccagcagaggagctgaagaaacgatttgaccaagaagatatctcactggacaagcctattatggcctcgtgtgggactggtgtaacagcttgcatcttggcaatggggcttcaccggctggggaaaaccgacgtgccgatctatgatgggtcgtggactgaatgggcgacacaaccagacttgcccatagagagtgttgaatcttcttcatgaaagtctccaccgtaaaggctagcgacaagattacaagccacagacggaaataattatcatgtttaagttgagggatttgtttgaagttaatcataatcctggctttaaatttgcctcaaccctcaagccgaagaggactgtatctatagaacttggaacttttccttttcgtttctggattcatcttctcagataacaaaaggttgttttctgtgttttctttc

SEQ ID NO: 350 - DNA, 565 bp, Arabidopsis thaliana
ccacgcgtccgctctttaaaagtttagtgatcggaggcttctcgattttctctctcttctctcacttgaatttttcagagaaagaaaaagcgattcatggcaagactccgtccaacatcgttcggcttctttaacgacgatggttggttcgtttccagcatcaattggcttctttagtggtggtggctggcttttgtatccggacgtggtccggctttgccgtcttatctcgccatcgttgctgttctggagaaatttagatcaaatataaactctggatattgtggagcagagagtcagatttacaagcgtgatgagattgtcgtagaggaaatggtgggttatcggatttgatggtggtgctgggagataacgatgaaacaatcatcggcgtaagagaaaagtcacatccacgtgtcgtatgttgctttgacttgttttattagcgctgtactctttactacaaggtgtttagttgtaccctttatggatttgtgaaatactttgatgactgggctttagtgatgtttgtaaacccataatttgaataaaaagaaacttatga

SEQ ID NO: 351 - DNA, 565 bp, Arabidopsis thaliana
acgaagaagcaaatatggcggtcccattgcttaccaagaaggttgtgaagaagaggtctgctaagttcatcagaccccagagtgaccgtagaatcaccgtcaaggaaagctggaggaggccaaagggtattgattcaagggtgagaagaaagttcaaaggtgtgactttgatgcccaatgttggttacggatctgacaagaagactcgtcactatcttcccaatggattcaagaaattcgttgttcacaacacaagtgagctcgagttgttgatgatgcacaacaggacttactgtgctgagattgctcacaacgtctccactaagaagagaaaggcaattgttgagagagcttctcagctagacgttgttgttaccaacaggcttgctaggctccgtagccaagaagacgagtgaagaagaatcttgcctactacttagttgtttcttctgttttgttgcatttcctttttgttataagacgatttttgattactgctgtgtttgtgtttggagtgaacaaacatgagttttggttttagtatgaaacagatcaagttaagacc

SEQ ID NO: 352 - DNA, 565 bp, Arabidopsis thaliana
ccgagcggccgcccgggcaggtcctcttttaagtctctgtttcataaataaaactaataaagaagaagaagaaaacagagcaattaaagtccttaaatcttcttcttctccaattcaatggctcttccgttgccattgatcttccttatcttctctcatttgttcgtttctggagttagatcaacgagcttcattatggtgaacaaatgcgaatacacagtctggcctggacttttatcaaacgccggagttccaccacttccgacgaccggattcgttctccaaaaaggcgaagaacgaacaatcagcgctccaacttcatggggaggaagattctgggggagaactcaatgttccaccgacaccgacggaaaattcacttgtctcaccggagattgcggatctggtaccctcgaatgctccggatccggagcaacaccaccagcaacactagcggaattcacactagacggatctaacggactcgatttctacgacgttagtctcgtcgacggttacaacgtcccgatgctagtggctccacaaggaggctcgggtttaaact

SEQ ID NO: 353 - DNA, 565 bp, Arabidopsis thaliana
cggccgcaaacactctcatgtaccttatatatctataatcttaaaatacagcaatttaatatatctatatgtattataaagatcattttatcactggaaggtaaaacaagaaatcttcagatgataacaggaaccagatggtgatattatgtctcccttgtagtttacacggagaacgtaccagacaggttcccaagtgttgcaagtggcgatcctgcatctgtgaagtaggacgcgagattgatccccgagtagtcgtatttgttcaagaaaggatgttccatcagttcctttgcagagcttcgactgtttggatccttctgcaaacatgtggagatgaatgaagataactcaggggagaaatttcctgaaggaagagcgggtggcggttggtcaacaatggcttccatcaactcgaaaacactggtccatgtttcctcttgattcggaggtgcataagggaactttcctgttgcacattcgagtactactaaacccaagctccatatatcacttttatttccgtacttgtttccaacgattctctctggagacatataattgt

SEQ ID NO: 354 - DNA, 565 bp, Arabidopsis thaliana
tcgagcggccgcccgggcaggtctttaagcatctctctcccttcaaagaaaatatcacaaaaatggcaaacgtctccgctttgctcaccatagctcttctcctttgctccacgctaatgtgcactgcccgccccgaaccggccatctccatctctatcacgactgctgccgatccatgtaacatggagaagaagatagaaggaaaattagatgacatgcatatggtagaagaaaactgtggtgcagacgacgaagattgcttaatgaggaggactttggtcgctcatactgattacatctatacccagaagaagaagcatccttgattttcacttactcatttctaacaaacttttgctcaagattatgtaatttatgtcatccttaattagtatttgtcacatacaagatcaagatagttatgattgtgattatttatatgtattttggatgatatattgtagaactagaagtttgacaataaaaagtttatagtgtcgttgtatgtttaagaagtttgacaataaaaactttatagtgttgttgcaaaaaaaaaaaaaaaaaa

SEQ ID NO: 355 - DNA, 565 bp, Arabidopsis thaliana
  misc_feature (1)...(565): n = A,T,C or G
ctttttttttttttttttttttagcaacagtaattgtctgtaaataaatcaattaatcaacaggtatttgtcagagcaaaatcagaagaaaggaaaaaaacaaaaaaaaacgctgcaacaagataaggaagaaagaagaaaaagcagaggaaagttacataatctttctataggtccaagttccacctactatgatcctcagaaggcgtggaggaggaacctccaaatagactaatctttggtcttttttgatcttttcccattggtaacttccaaaacgaatctgagttctcgaagaatacgtatgcagctatcactgatgccatgaacaagcaaaacagcagtgcatatatctgccactctttccactcctttggtacagtgagtttggtcaccatctctccccattcgctagaagttgtcagcataaccctttcactggggcagaactcaagtgaagcaatggattgaccaagatgcagcctcttactgtagtggtagntntccattnnnttaacttcagcaacagatacatctccatctttcccacccaaagcaatatatt

SEQ ID NO: 356 - DNA, 565 bp, Arabidopsis thaliana
gttcttcttttttcttctctgggtttgagaattggtgtaagagaaacgattgaggttttctcttattatctaaacccaccaagtctttcaggattttagccagagaagcttgagtctttgattagggacatgtcaacctccgccgcttccttgtgttgttcatcaacccaggtcaatgggtttggtcttaggcctgaaaggtcgcttctttaccaacccacttccttttctttctccagaaggagaactcatggaattgtcaaggcctcatctcgggttgataggttttcgaaaagtgatatcattgtttctccctctattctctcggctaatttcgccaaattaggcgagcaggtaaaagcagtggagttggcaggttgtgattggattcatgttgatgtcatggacggtcgttttgttcccaacattactatcggacctctcgtggttgatgctttgcgccctgtgacagatcttcctttggatgttcatctgatgatagtggaacccgagcagagagtaccggatttcatcaaagcaggtgcagatattgtcagtgtacatt

SEQ ID NO: 357 - DNA, 565 bp, Arabidopsis thaliana
ctaagattgttgatatctgtgagaaaggagactcttttattaaagagcaaacagcaagcatgtacaagaattctaagaagaagattgagagaggtgttgcgttccctacatgcatttctgtgaacaacactgttggtcatttttcaccgcttgctagtgatgagtctgtgttggaagatggtgacatggttaaaatcgatatgggatgtcatattgatgggttcattgcccttgttggtcacacacatgttcttcaagaagggcctcttagtgggcgtaaggctgatgttatcgctgccgcaaatactgcagctgatgttgctctaaggctcgtacgtcctggaaaaaagaacactgatgtaactgaagctattcagaaggtagctgcagcttatgactgcaaaattgttgaaggtgttctttcccaccagctgaaacagcatgtgatagatggaaacaaggttgtgcttagtgtatccagccctgaaacaactgttgacgaagtggaatttgaagagaatgaagtctatgcaatagatattgtggcaagtacctgcccgggcgg

SEQ ID NO: 358 - DNA, 565 bp, Arabidopsis thaliana
  misc_feature (1)...(565): n = A,T,C or G
gcggccgccagctcgagattcaaagaaacctgcaactccgaatagaagaacaaggcaagtacctgcaaatgatgttcgagaagcaaaactctggtcttaccaaagggacagcctcaacatcagattccgcagccaaatctgaacaagaagacaagaagactgctgattcgaaggaggttccagaagaagaaaccaggaaatgtgaggaactagaatctccacagccaaagcgtcccaaaatcgataattgaaagtattggtcttttgctggataatctcggagtttcagagttaacagtgatagagagaacgagctcttatcttgaggttcttcaggacttctctctttactgtttaactatttttctgatggaagactctcaactcagctgtgtagacaaacaacagatccccaaggaagaaacaaaacaaaaataaaaagttagtttgggagaatnntcatcattcagtgtaatctaaatgcttaactcatcattagttttacagctacagatttcttatgttaatcttttttagaatatcaaacctgaaaagttttctgcgg

SEQ ID NO: 359 - DNA, 565 bp, Arabidopsis thaliana
ttttttttttttttacacaaaactgtaatcgcatactgtgcacacaacaaacacacttaatacacaagtatatctcaaaagagttctctcagctgcgtaaaatctctaaatacaaaagcagccgtgggagagattattcgtcatcatcaattatataatcatcggttttcaccagaaaacacactagtttcagccatccaacagattcctcaagctacagaaagcttcaggcgaaagactaaaacaccttctcttctccaatggcaccaccggcttgtcccctctgtccattgtcatgaaacataccaccaccgcagttaaattatcaaatgagttccgccccagagcctccatcactagctctcgcgcacatcttgttggatcgttgtgccggtttaagccacgcctaacaatgctaaccgcttcttggctcgtcaagacatcccaaatcccatcgcacccaatcacaagaaactcatcgtcttcagttagagttatctgcttgatttctggttccgagatcagtggagattgagagccgtgtggcagttttaaatcccagtcg

SEQ ID NO: 360 - DNA, 565 bp, Arabidopsis thaliana
ggatcctctagagcggccgccctttttttttttttttttttgatatataactctgtttctacagctttcttataataaaataatatcacattacagggaagctaaaacgtgaaaagatttgattctatgatgatatataatctttgaatcaataaaatacaattatttttcactcaaaatacgccgtgttaaaaggtttcaggcaaatgaggttcggtttgatcatttacttttgcctcactgatggatcaacggctagaaacagatgagggatgattggttgcgacttgttggctcgaagcttcgtcagcttgaagtttcttgactcgagccttatcgattcgtgctcttctcacagcttcttggatatgtcggtcatggtctttcaacacttgatccatgtttcctgatggaaccactaacggtcctgagtaatgaatcttgtgcccttttgatccataacccaagagaatagggtctttcttgttgcttcgaccattctcttcctggtttgcttcttcagacgtttccttgaatgaacctggaagccgagtcattcctctgc

SEQ ID NO: 361 - DNA, 565 bp, Arabidopsis thaliana
  misc_feature (1)...(565): n = A,T,C or G
ccacgcgtccgaaagattgaaaacatgacatctgcttatcgtccaagagttattgtgaatggaacaagaagaacaagaacgttccattacttctattgtcgccattgtagccgtaccattaggctaagaagctttggtctatatggtcccatatgtcctttctgttctagagagatcaatcttcacgatgagcttgacattatgaggccaagccgaccttattgggatagtgataccgatnnnatcactctccatcttatcaacgaaccaagaagtaaccggttcaatcatgatgatctagtttataatactgacgaggaattcgctgatgtcatgcctagtgtacaaatcggtccaccaccagcctcgcaatccgccatcgaggctgtaaggacggtgataatcacggatgaagatttggtgaaagagaaggtttgtgcgatatgcaaggaggaatttgaagttggagaggaaggaaaagaattgaaatgcttgcatttgtaccattcaagctgcattgtgtcttggttgaacattcacaacacttgtcccatttgtcgttttg

SEQ ID NO: 362 - DNA, 564 bp, Arabidopsis thaliana
  misc_feature (1)...(564): n = A,T,C or G
gcgtccgggaatctaaagatgatgaagaagctgcaaggagacataaaatgttggaagccattgaacgtgaatttgaagctgctcatgctggatttgaacaactaaagactgatgattccgcccaaggattagatgatgaacaatctgcaaagagacaaagcatgttggacgagattgaacgtgattttgaagctgctacaaaaggtcttgagcaactaaaggctgatgatttaactngaatcaacgatgaagaacacgctgcaaagagacaaaagatgcttgaagagatcgaaagagagtttgaagaagctacaaaaggtcttgaagaactaaggcattctacctcaagcacagatgatgaagcacaatctgcaaagagacagaatatgctagatgagatcgaacgggagtttgaagctgctacaagtggtcttaaagagctaaagattaatgctcacactgtcaaagatgatgttgatgataaagaacaagatgccaaaagacaaagtatgctagatgcaattgaacgtgagtttgaagccgttaccgagagttttaaacaac

SEQ ID NO: 363 - DNA, 564 bp, Arabidopsis thaliana
ctttttctttttttttgttaagaaaaatgaaatgatgaatttgaatacaagctggttaaaatacaaagacagtacatatttctttatgttttctttttgccttttttttttttaacaaaaagaaaacagaaagatattacaatttatactgtaaaaatttataaaaatataatttttctttttcttttcgatatatctaaaggtctccgaaaaatttagcaaaattgtcaatagcattttttgcagcgaaattacgagcagtttctttcttgacaggatggtgaccacatccaacaaacttatcctcaatatggaaacaataggtttgattttcttcccaagtgtctttggacgtcaatttcaagttcctcttctgacacatctcattgagttctgtcattggatggctcttcattttgtctaaatgtattattggctccaacaatggttttatcaccttccagacggtctcggtggagttgcagtccatgaagatagctccaatggtagactctactatgtctgctagaactttaggaacttttaaaagaccatttgaatgta

SEQ ID NO: 364 - DNA, 564 bp, Arabidopsis thaliana
ttgtatacattttgagagctaacggtatgattccagaatttatgtatacaacttttctcaaagccaaaagatacaaatactactaagaaacaaggtcaaatgaatttgataagcaagccttaaaggcgtgaaagaaccaacttttttactgaactatattcaagtgatgcttttcttttcttttctgacttgtttaagcgattgccgatttgattgtctcagtttcttcaggacgccaccatgacttttcaattgaaagcaagccttcattgtctttggactgcgtcattttaaccttccatttcatagatttcaccattttctcaacttctcctaatgtttccatgtcatcccttatgatgaaagttccttgtggcctaagaatccgatcaatctcagccattaccgacaccaaattgcacctcttcctcagggtagagaaaagatgatcggcatggagaaggtcgtaagttctgggataagtgttgaatgattcacaccagtcatgatagattccaaataaaccacgttcatatatgatgggaagtgtatctggcgcggccg

SEQ ID NO: 365 - DNA, 564 bp, Arabidopsis thaliana
tttttttttttttttttttttcaattaaagagtaacaacagtttataaaaacagaagaattattcaacaacaaaactaaaaccagagagggacaaaagcaaagcagaaaccagagagaaaaatccaaagctgcaataaccttaaacttgtctttaagaaagctggcgcctcttgtaacgcaccatcacattgcctttaactccaaccaccatagcgttccagtcaatctcagggaacggtgaaactagctcaagctcgaagttcctcaacaaatgactccatatggctttgatctgcaggtaagcaaacggctctccaaggcacccgtgccttccccctccgaatgcaatgtacgagaatgcccctgcggctttgtcctcttctcttccaggggagaatctttctgggtcgtaggtgtcggggtctttgaagatgtgcggtaagcggttggcaaatgcaggggaggttgcaacgatgtgaccctttgggatatcgtaagtttttccatcccgagctgtcacgctgaaatcactgtgcgaggctctcattaacatgatgagtgga

SEQ ID NO: 366 - DNA, 564 bp, Arabidopsis thaliana
ttttttccggtgaaaagggagcagaaacatggttgtacgtatcagattatcgagatttggatgcaaaaatcggccattttttagggttatggctgctgatagcagatctccaagagacgggaagcatcttgaggtcttaggttacttcaatcctttgccaggccaggacggtggtaagaggatgggtctcaagttcgatcgaattaagtactggttatctgttggtgctcagccatcagacccggttcaacgccttcttttcagatccggtttacttcctcctcctccaatggtggctatgggatgtaaaggtggagcacgagacacacgcccagttgatccaatgactggtcgctatgtggatgcagagaataaaacagttaatgccaatgataaccagcctaaggaagaggattcagaagacaagattgcatgattcattagccttctgtcgtcgtagcttttcaagttcactttgttgtcgattatattgtgtaatgcagcattagacaactgacttgtttcctttgtttggcgataaacggcaaggtgtttggcaaaaaa

SEQ ID NO: 367 - DNA, 564 bp, Arabidopsis thaliana
tgaaaattattgaaaaatcttgacatagagactacaaacaaaagtgtttcctcttgtttatgatacaagaagaacattgataaaaccacagactctagtaaaacagtcttatcgttaccgaagtttgtaccaatgaacacacaaaaggagacgaagattgcaataattgggtggtctttcagagctgatgtatcattctaaaccgttgcgtttgtcagatctttcactgccacaatttcttgaggctcagctagctcctcttcatgcttgacgatgaaagctgtatcaacttttccatttttgaaatcctcaacatcaaggataagtttgtggtaattgatagtcgttggaacccctgtaatgatagtgtcattaagcgcccgcttcatccgttcaattgctttttccctcgttggagcccacacaataagcttcccaagaagagaatcatagcttggaggcacaacatagtcggaatagacatggctgtccattctaacgaaaggacctccagatggcaggtatgatgttattctgccaggtccaggtctgaatcctttaaat

SEQ ID NO: 368 - DNA, 564 bp, Arabidopsis thaliana
ccacgcgtccgatggtcttgtcttagagaagacctcatcaccattaggcgtacttctgattgtttttgaatcccgacctgatgcacttgtacagatagcttcacttgccatccgtagtggaaatggtcttctgctgaagggtggaaaggaggcccggcgatcaaatgctatcttacacaaggtgatcactgatgcaattccagagactgttgggggtaaactcattggacttgtgacttcaagagaagagattcctgatttgcttaagcttgatgacgttatcgatcttgtgatcccaagaggaagcaacaagcttgttactcagataaaaaatactacaaaaatccctgtgctaggtcatgctgatggaatctgtcatgtatatgtcgacaaggcttgtgatacggatatggcaaagcgcatagtttctgatgcaaagttggactatccagcagcctgtaatgcgatggaaacccttcttgtgcataaggatctagagcagaatgctgtgcttaatgagcttatttttgctctgcagagcaatggagtcactttgtatggtgg

SEQ ID NO: 369 - DNA, 564 bp, Arabidopsis thaliana
cttttttttttttttttttggttttggagttgttcacattaagaaaccaagacagatactgaaacacagaaaaccaaacacatgatctaaaatgtgaatgtggttcagggtttcctctgccgtagactcttctcatggagtttagagagacaatacaaacacacaacttattatagctaaacaagtttttattttaacatagaagagaaaacgtgagtttgttttggtggttgtgtttcactcagatcttagctgcgaaggaaattccttgtttcacgagctcgtcgagactctctgcagaaggtcgagctttggcgactttagccaaggctttgttctcatcaccactacctccctccatgaatgctccaaccactttaccaccttgaacccaatatgctccaaatcttggttttgggtttgatggattgctgtctccaaataacacagagtctcctacgttgtctccgtagaactgccatgagagatcaaaggagcgagagtagaagaatggaagatagtcgtattcctccaccgctgcgcctccctcagccgctttgatcg

SEQ ID NO: 370 - DNA, 564 bp, Arabidopsis thaliana
  misc_feature (1)...(564): n = A,T,C or G
accactatgttctcaggtatcgctgaccgtatgagcaaagaaatcacagcacttgcaccaagcagcatgaagatnnaggtcgttgcaccacctgaaaggaagtacagtgtctggatcggtggttccattcttgcttccctcagcacattccagcagatgtggatctccaaggccgagtatgatgaggcaggtccaggaatcgttcacagaaaatgtttctaagctctcaagatcaaaggcttaaaaagctggggttttatgaatgggatcaaagtttctttttttcttttatatttgcttctccatttgtttgtttcatttccctttttgttttcgtttctatgatgcacttgtgtgtgacaaactctctgggtttttacttacgtctgcgtttcaaaaaaaaaaaccgctttcgttttgcgttttagtcccattgttttgtagctctgagtgatcgaattgatgcctctttattccaaaaaaaaaaaaaaaaaaaaaaaaaaaaaaaaaaaaaaaaaaaaaaaaaaaaaaaaaaaaaaaaaaaaaaaaaaaaaaaaaaaaaaa

SEQ ID NO: 371 - DNA, 564 bp, Arabidopsis thaliana
  misc_feature (1)...(564): n = A,T,C or G
cagaaatattatattaaccaagaaggtaatcacaacagcttatgtgatatgcatcaacaatagaacattaaagatgaattcaacaattccaaaactgaagagaagagaattgtcgacaaagttaagnactganaanagaatacaaagcttaaaaattggtcgagtaacatagatgtcctcacatgactgcaccaagtcctatcacttgaacatagccataattccaaaacagagaagaataaaacataanagcttaagccttgggggctactttctccttagccttttggagtttcaacactttcttcacaatcttttgctcttcgacaaggaatgcccgaatgatcctttccctgactgcagaaccagacaagactccaccgtatgctcggtttacagtcctcctgtttcttgataatcttgacctcttgtactcagagggcctcaagtgagggattccttgaatacgcttgccngnaacaggacatttgggnnnactagctctcttctttgtggtttgatacaccaatttacctcctggagtcttgacgatacggtgctggt

SEQ ID NO: 372 - DNA, 564 bp, Arabidopsis thaliana
gcagataaaatgttatagactcaaaaacgtacgtaattgttttgggttcacggattttctttcaaggaaaaaggaagaagaagaaaaaaattacataaaatttggtatgaatacaaataactaaattaaaacattacgaagacgagacttgcaagcaaaccaaacatagccattgatgcagcaaccgagttcgctcttcctccatttccctcactcttgccattgtctttaccattgctactgctgcttcctcctttcttttcttctcctcctttactagtaccgtcacaagagtatttgtcgaaaacgccacatttagttgtgattgctttggagtaaggtccggtgatgtttgaaacggcggggtttgctatgtagttatcacaaagacaagtcacttgcgttgaggttgcggattttagatcggtgcagcaatcttctgttggcgtcacactaccggttgcaaaacacttttcgagcaggtcaggcataaccgtggcacattcaggagtcatctctggaaacatcgttgactgtggctcagctaatagcggagcaatcgca

SEQ ID NO: 373 - DNA, 563 bp, Arabidopsis thaliana
aaacgtcttgacaaaagtcaagttactcaagatagagccgtaagttctgtttgtcgttggctcgaactcgtcttgaccaagaaaccggaacacaagacttggtccattacgcccgaaccgaccagcaattttcttaaagaagttcacttcaggggaagagatgaagtcaatgagaacagtttttgaagctgcaaccagaaaactgctcatgctcaaattgtgctgcgcgtagaacgcatcgtgctgaacatttaaccagaagaatgatggtttcatctgcgtggatacgctttgaaccgtcataatcgggttagaattaccatcgaacttttctgaccgagataaaatacctcggatcaagttaacatctttgagatctttcaaggagaaatcaatggtgaaccaaccggaagtaggaactccgttaaccgggtaagatttttgtcgagtagggtaaacagcttcaatagatgaagaattgctcattgttaaatcaggaagcaaataccaagagcatctttggttagctgaacatcacaccatagaacagcatctggtacact

SEQ ID NO: 374 - DNA, 563 bp, Arabidopsis thaliana
  misc_feature (1)...(563): n = A,T,C or G
ccacgcgtccgcgacgagtcaattttaaccagatttagaggatttgtggatgtgatttcttcttttggtctcttctctttgggattttttttcattggaattgagcatacacatgtgttttccgaatagtttttggagtgagaattaagtttggattgttgattctcttcctctggtcatggaggagccttgtgagacacttgacagtggtgaagcctatcaaatatctagatatcataactataaccaacacagctccagaagctcatctccctggttggatttgagagtgttctatgtccggataagcaatttcgtggtggaagattcaactcctgaggtcctcactatcaatcacattcctctggatccagatacgcttttggagattaacggtgttagaatgggaatgtactcagaaggaggttcttcacagcttnngagagatcgggttgataagaaatctgaagaagctacttatgtcagcacagacaatatcagnttaactggtagtgtgaagtttgaggtttatgacaaaaatgagctagttttgtctggaactc

SEQ ID NO: 375 - DNA, 563 bp, Arabidopsis thaliana
ccacgcgtccgcaaagccaatcaaattgagagagatatcaagaaagcaaaataatgaagttggccgtggtctcagtcgtcgtcatactcggagttctcgtggcttggccggtatcggctggccgaaaagacttacctggagcgggaggatacggaggcgatgacgatgatgatacaaagtcattgttccctttggacaacctattatcgttgaattattatgataggatttgtcctgattttgagaaaatcgttgttacgaaagtgagggaatggactaagagtgactcttcccttggtcccgccctcctccgccttatcttccacgattgtggcgtcacgggatgtgatgcgtctgttcttctagactacgaagggacagagagaagatctccggctagcaaaacactaagaggcttcgagctaattgacgatatcaagtccgagatggagaaatcatgccccggaaaagtatcctgcgccgacatcctaacatcagccagccgtgccgccaccgtccaacttggtggtccttactggcccaacgtctacggtcgtcgtgac

SEQ ID NO: 376 - DNA, 563 bp, Arabidopsis thaliana
  misc_feature (1)...(563): n = A,T,C or G
ccacgcgtccgccttcttccgattctgtacccatatctcacgcttaattacagtattgccactcattaaaaccgtaccatcttaaccaaagcgataacccgtaccaccggttcagctatggaggatttattggaggagaggctaactcggactgactctgtcgggcataaacgagtcagagacgggttagacctcgactcgccggacgtgaagcggttaagagatgatttgttcgatgactcggggcttgacccagtgagtcaagatcttgactcggtgatgaagaatttcgagaatgagttatcgaccacgacggcggcgctaagctccggtgaaactcagccggatcttggataccttttcgaagcttctgatgacgagctgggtttgccaccgccnnntacgccaccgcaaacgctacttcctccgtcgtgtgaggaaacggtgacggaattggtacgagcctcgtcggattcatcagaggttggagagttatgtgggtttgaggatcatgttacggagttcggaccttgcgatcttggtgatgatgggcttttcgaata

SEQ ID NO: 377 - DNA, 563 bp, Arabidopsis thaliana
gcttcgcatcttcttctccggcttgatcttctctcgtttctagatctccgacgatcggaatatcaaatccgatcgattaattctgtcaatcacacaaaaaccgaaaaccaaaaaaaaaaccatggcgtttgagaagatcaaggtggcaaatcccatcgtcgagatggatggtgatgaaatgaccagggttatttggaagtctatcaaggataagcttattactccttttgtggagttggatatcaagtacttcgaccttggtcttcctcaccgtgatgctacggatgacaaagttactattgaaagtgctgaagctactaagaagtacaatgtggcgatcaagtgtgccaccatcactccagatgaaggccgtgtcacggaatttggcttgaagcagatgtggagaagtccaaatgggaccatcaggaatatcctgaatggaactgtatttagagagccaattatctgcaaaaatgttccaagcttgtcccaggctggacaaagcccatctgcattggaaggcatgcttttggtgatcagtacctgcccgggcggccgctcga

SEQ ID NO: 378 - DNA, 563 bp, Arabidopsis thaliana
tttttttttttttttttttttttttttttgtattaagtattaacattagtagaattctctgaacataacttaaaatcaaaacttgtatctactaattatgggaaaatagtctcaaattgaatctgaaaaagaattgcaaatttttaagaaaaataaagaaactaaacatcaaagtgttggtgtgttgtgttaatttgacttcttttttctctgttagcaaaccattgagcagtttttctagcgatcggcagccacaaacgccgtcttctctcctccgtctcattcccaccgttttgtaacgcagacgcagtctctgcggctgaaccgctgcaatctccatgaatcgatatactgagtctaggaaccgcagtgatgtcagacaccgatcttcgtcctggttcgatcataacgcttcttgatttcgaaccagagtctccgttttccgaggaaaacatagttgtcatcgaagttaacttgttctccaacattctcttcgcttccatctcttccttgattcgcaagatacctatctgatcctcttcatctcctctcttcacatgatc

SEQ ID NO: 379 - DNA, 563 bp, Arabidopsis thaliana
caaatgagaagcaagttagaacatttttatcaaaccaaaaattatcgttttagaaaattaaataaccaacgccgaggtaagtaacaacgctaatttcagctaaaactaagagtctaataatataatgcttttgatttatttcttactcctccttttgcttcgtggaaagagtgcgaggtgagtagcggtagccactcgtacaccttcctacaaacttgagcacttcgtctataagaatcactggaagcgaaacagccagtaccagcagccactcgttcaagctcagtggcactatcccaaatacctgagccaggaatggcacgtacagtatcacaaagtggagcccgaatgagacagccatagccaggagtaaccacgggttcacccacggcggcatcgttaccaggctgccgtcttctgagagtgcgttcagggagttgaacatttcaatggccaccaacaccgagagggagagtgtggacgccttgattttcccctgctggaaatagtcgcaagggtttgagtcgaacgagaaagtctgagagcctgctgtgaagcggccg

SEQ ID NO: 380 - DNA, 563 bp, Arabidopsis thaliana
tttttttgataccaaagaaacagatgactaaagacaaaaaaaaaatctcagggcactcgagttaagtatccctaaagagatctctaaacatatttaataaaaatcagggaggttcaaaaacagaatcctctctagtctcttctacttactaccagtaactgtaagttctatcctgatcctgaccattgttaaattctgggttagtctcgtaatttacatacatactctgatcgtaataatcatggggcggatacggtgctggaataggatatagtgatggtgttgcgtccagcacgaccgtgttgttgtgatttgtttcttgctccacgaaataccgggtttcgggtttggtacctgagaacattctgcaagcgacagtgttgtgtggcgatggctctacgttgtggtatacgttgttgaagatggcgaaaggagaagaagagtctacgacgtggcaaacatctgtgtagtctatggtgctgaaagagtctctggttgattctgtggtgaaagaagcctcgtctgagcttgtgaagagagaccattcgcttgatgatgactct

SEQ ID NO: 381 - DNA, 563 bp, Arabidopsis thaliana
ccacgcgtccgcaggtttagggatgaatcgatcaacgatgatgattatgaggattgaagagtcggcgattgttttgtctctgctcaaatcggatctccggccgatggaagacgttttatcggaattcgactctaagttcgaaagcgctcgttacctcagtgtctgcaattctctttccatgatgttgcaggatcagcagatgtttaagaatactgaacgtctaattgcatttggtatcatataccagtgttattcttcacagaagccatctttcaacccgtttttatctgaaatgataagtgctgcttgtaatgaacagctggaaaagtctgaaagggcatttcttctccacctgttacaatggaatagttacaacaacgtgaaagagattctcaaactctcagctgttgattatatcagatcgtttgatccttcaactcatgattttccggaactaggagagctgcaacgagagtatggcgacaaagccgatcctggaccatctagtcacatttttgcagactattccctgaaaaagctattgcatgatcctgatgttcctc

SEQ ID NO: 382 - DNA, 562 bp, Arabidopsis thaliana
tttgaaactaaaaagatatctcaatacatatatcctgtaaagtgtcacataaatattccatacaaaactttgaattccaaactattgaagcactagagagatccacagacatacgttgtaaatttacttattatcaatgattctcaactcaaatacatgtgaacaaaaagctagcaatactctcaagcactgatgttttcgaaacttgcgcttttatctactctcttgaatatccctgcaattacctttccaggtcccaattcgtagctgcttttaagtcctttggataagagagtctttactgttgtctcccattggactggagatgtcacctgtagtctggcgtgcaagtatcttcttgatcgtgtctggatctgcatgaggctgtgcatcgacattcgagatcactgggatcctcggacttctgatctctgtggctgccaatgcagcttctaatctcgagactgctggttccatgaaactagtgtggaaagcacctgcaacagctagacgcaccgtcattcgtgctttgaatgacttagctttggcttcaacaacttcg

SEQ ID NO: 383 - DNA, 562 bp, Arabidopsis thaliana
ccacgcgtccgactttctaagaatagagaagaagaagatgtcgatgattccgatcagcaatcgccggagactatctcccggcgatagaatctgggaaccatttgaactcatgaacacctttcttgatttcccatcaccagctctctttctttctcaccactttccctcactttctcgagaaatattcccacaaacttcatcatccaccgtcaatacgcagctcaattggaccgagactccgacggctcacgttttcaaagcgtatcttccgggagtggatcaagacgaagtgattgcgttcgtagatgaagaaggatatcttcagatctgtactggcgacaacaagttcatgagcagatttaagcttcctaacaacgccttgacggatcaggtcacggcgtggatggaggacgagtttcttgtcgtgttcgttgagaaagatgcttcttcgtcgccgccacagctgccggagattgaggagaatcgtaacgtgagagttgtggaaatcaccggcgatgatgattaattaagtgttacatgttgtcgagatatatgtgaatta

SEQ ID NO: 384 - DNA, 562 bp, Arabidopsis thaliana
gcgtccgcggagaaggtaaagaaatggtggaacagatagtgaagcgacttcatgcattgagctaccacatgaggagctacttttggctagacttgaagcagcttaatgacatttaccgatataagacagaggaatactctcacactgctgtcaacaagttcaacgtaatccctgattctcttccagaatgggttttcgactttatgccgcctcacggagggttctttattggcaacgttagccctgcaagaatggatttccgttggtttgctttgggtaattgtatagcaatattgtcttccttggctacacctgaacagtcgacagcaattatggatctgatagaatctcgctgggaagagttggttggagaaatgccactgaaagtttgctatcccgccatagaaagccatgaatggagaatagtaactggttgtgaccccaaaaacactcggtggagctaccacaatggaggatcgtggccagtgctgctatggcttctgacggctgcttgtatcaaaactggtcgacctcaaatagcaagacgagcaattgaagtagc

SEQ ID NO: 385 - DNA, 562 bp, Arabidopsis thaliana
ttggaaggcggaacatttccacgggaagaagcggcatacgattccctcgaatcattggagaccctcctttcacatggtttaatggggatcgcatgcatggatccattggtattcacccgggacaatcagcacgtgggctcggcagacgaacatggggacagctctttactcccagatgcaatcttgggggactcaactagcaaacataccgagtgtaaaaatggaactgttgaatctttctaaaggtaggagaagtagtatatggcttttccgatatcagcaaataaattgggaggacactaatatagtaatatgtttgatctttaaatgtttatttggttttgaatgattttctcttcttcttgccatgatatgttacatggttgctctcttatgagtttctttctttctgtaaagcttttgatcacccgatatatatggcttcttatattttgtttctattgctcttagatttcatgtttgcaaacggactgtgatgttgcaaacgaaattttcatacatattttagaaatttatacttcgcaataacatttgtatcatt

SEQ ID NO: 386 - DNA, 562 bp, Arabidopsis thaliana
ctaaaccaaagctagagaatgcggctgcgtgttcttacacggtgatcattaagacaagctgttcctctgtgtcttacactagagataagatcagtatatcgtttggtgatgtctacggcaacgaggtgtatgtgaagagactagacgatccatcgtcgaggacgttcgaaaagtgttcatcagacacatacaagatatcgggaccgtgtatgcgcgacgtttgttatctctacctcctcaggcaaggatccgacggctggaaaccagagaatgttaagatctacggctcatccatcagatcagtcactttctactacaaccttttcttgcctaactctgtttggtacggctttaatgtctgcaatggcattggcaataccaagtcttctcaacccattagtactacctcttccgttgcagctatgtaagattgatataataattaaaaacaaggacttgtgattatcggtgaattgctatttgtatggcataacttggagaagaagtacaagtgtgttgatcatgagtgtatttttgagagaaaaaaaaaacttgtatgttg

SEQ ID NO: 387 - DNA, 562 bp, Arabidopsis thaliana
tctgagaaaccgggaagatgcagactctggacttacatgggaagaatacaagtcaatgacttacacatttcagttcataaacgaaaccgcgagactagcaaatatagttcctgcaatcttcagaaaggcgttgagagatataaaattcaaagattatacgattccagccggctgggcggtgatggtctgtccaccagctgtacatttgaatcccgaaatgtataaagatcctttagtctttaatccatcaagatgggagggatcaaaagttacaaacgcatcaaagcacttcatggcgtttggtggaggtatgaggttctgcgttggaaccgacttcacaaaattgcagatggctgcgtttcttcacagcttggtaacaaaatacaggtgggaggagataaaaggagggaatataactcgaacgcctggattacagtttccaaatggttaccatgtcaaactccataagaagagagactagagaatgttttttaattagtgaataattggtaggatacatacgctatacattttccgagactgtaataatcttgaacaccct

SEQ ID NO: 388 - DNA, 562 bp, Arabidopsis thaliana
cgcccgggcaggtaatttcttcacaaattcggcggcgatgaagttcaatccgcgtgtgacctcttctcgccggaagaacaggaaggctcacttcacagctccttcaagcgtgaggcgcgttctcatgagctcgccgttatccaaggacctccgtaacaaatacaacgtcagatccatgccgattcgtaaagacgacgaagtgcaagttgttcgtgggacgttcaagggaagagaagggaaggtgatgcaggtgtatcgccgcaagtgggtgattcacatcgagagaatcacaagggagaaagtcaacggaaccacggtcaacgtcggagtcaatgcttcgaatgtgatgatcactaagctccgtctcgataaggataggaagtcgcttttggagcgtaaggctaatggacgcgccgccgccgataaggagaagggaaccaagttttcagccgaagatgtcatggagaacgtagattgatcttaacgtatgtttttttcttcttcttttctagttttctattttgatttcattgatgatgatatgattcagaattcgaagttg

SEQ ID NO: 389 - DNA, 562 bp, Arabidopsis thaliana
ttgcttgtcagggtttagagagttgatgccggagtatcttccagctatctttccggtgtgcgctaatctcacctccctgaacttcagttatgctaacatttctcctgacatgttcaagcccatcatactcaattgccacaaactccaggtgttctgggcccttgattcaatatgtgatgaaggactacaggcagttgcagccacttgcaaggaactccgtgaactcaggatcttcccttttgatcctcgggaagacagtgaaggtcctgtctctgaattaggcctccaagcaatctccgagggttgtaggaaactagaatctattctctacttttgccagcgcatgactaatgccgctgtgatagccatgtcagagaactgtccagagcttactgtgtttaggctgtgcataatgggtcgacataggcctgaccatgtaacaggaaagcctatggacgagggatttggtgccattgttaaaaactgcaagaagctaactcgccttgcagtgtcgggattgctgacagatcaagcttttaggtatatgggtgagtatgggaaa

SEQ ID NO: 390 - DNA, 562 bp, Arabidopsis thaliana
  misc_feature (1)...(562): n = A,T,C or G
tctttctctctccttcttttctcatcttgcggcttccctttctctctctatcgccacaatgatcattaccaaccaaactgattgaaactcatttgttctctctctctcaaatccactctctctctttcttttctcttctcctctctgtgtctctatcgccatggctgatgataaggagatgcctgctgctgtagttgatggacatgatcaagtcactggtcatattatttccaccacaatcggtggcaaaaatggtgaaccaaaacagacaattagttacatggcggagcgagttgttggtacaggctcgttcgggatcgttttccaagcaaaatgtttggagactggagaaaccgtggcgataaagaaggttttgcaagatagaagatacaagaaccgagaacttcagttgatgcgtgtgatggatcatccgaatgtggtttgtttgaagcattgcttcttttcgactacaagtaaagacgagcttttcttgaactnnnntatggagtatgtccctgagagcttgtatcgagttctgaaacattatagtagtgcaaaccaa

SEQ ID NO: 391 - DNA, 562 bp, Arabidopsis thaliana
ccgcgcgagattcacggtgctgattacggcggttgtgctagcttttctaatggcggcgccgatgccaggagtgacggccaagaagtatacagtcggcgagaacaagttttggaaccccaacattaactacaccatctgggctcagggcaagcatttctacctcggagactggctctatttcgtgttcgacagaaaccagcacaatattcttgaagtgaacaagactgactatgaaggatgtatcgccgaccacccaatacgcaactggacacgtggagctgggagagacattgtcactctcaaccagaccaagcattactaccttctcgacggaaagggtggatgttacggtggcatgaagctatctgttaaagtagagaagcttcctcctccaccaaaatctgcacctgtcaagaacattggatcggtttcaatggtcacaggtctcgctcaattcatgattccggtatctctattcgctttccctgcaatgtgggatgtgatctcaaggatgtggtagtagtcaccagtcttcaaagttctttagttgaatcgaaaccga

SEQ ID NO: 392 - DNA, 562 bp, Arabidopsis thaliana
ctttttttttttttttttgtaatctctaatttattaaatagggttgctaaacttacagcaaaagtggttgttcaaaagaagcacagttcatacaacttatactagttcaacatgaaccattaacttctggtttgtttatagctgctcatacatactattgtccttaaaacataaacgtacgtgtgtgctcgcggaagacatatacacacatctgtatgtgtatatgtttaagggcacttgagacggccaccacgagtggtaatggaggcgtagcaaggacaaaggtggtggttcccggcggtgcctggtggcacacagttgcagcggtaacaacagctgttgcatgctctcaaacacagatttggcctcgacgatttgctgcatctacctttgcatctcccaccgcaatcaattttcactacgccttcaccgacttgtgaatcttcagcagcatgaacatgaagctcaaaagtggtgaggcagaagaggatcagcagtaaaactagtgtacttcggaagattgccatgtctcaaaaagcatgcagtttcgtgcaagatataa

SEQ ID NO: 393 - DNA, 562 bp, Arabidopsis thaliana
acaagccgctttactctcttgcgatatctctgagatttgtttgacagtctctaaccatgggtaaagagaagtttcacatcaacattgtggtcattggccacgtcgattctggaaagtcgaccaccactggacacttgatctacaagttgggtggtattgacaagcgtgtcattgagaggttcgagaaggaggctgctgagatgaacaagaggtccttcaagtacgcatgggttttggacaaacttaaggctgagcgtgagcgtggtatcaccattgacattgctctctggaagttcgagaccaccaagtactactgcactgtcattgatgctcctggccatcgtgatttcatcaagaacatgatcactggtacctcccaggctgattgtgctgtccttatcatcgactccaccactggtggttttgaggctggtatctccaaggatggtcagacccgtgagcacgctctccttgctttcacccttggtgtcaagcagatgatctgctgttgtaacaagatggatgccactacccccaagtacctgcccgggcggccgctcga

SEQ ID NO: 394 - DNA, 562 bp, Arabidopsis thaliana
  misc_feature (1)...(562): n = A,T,C or G
atgtattaccgcctcgccggagactgatacagtttcttctgtccctcattgaaagaagannagaaaacaaaaatagaaaaaaaaagaaagcagaaaaaaagcctaggaggaacaatgaatttagaaaaccaaaccatgacagaaaagtctgcgggattctctggttagctctaggtgatgatatgatcaagtttcgtcctcactggctttgtatgaagggaaaagaagataatctaaaagattcgccaaaagacacagatcgttcaccgtgatggctcgcctacaatatcgtggtaaaacaaaaacgattgtactaagtagcaattcctctgtttggttgtctcttgttcacactgtaactgccaacataacctggagatgaacttctagctgaaacatctgaagaaggaacccctcctccaatcccatagctaaaaggagcaggcccttctgtctcaggagttggtgatctccatgtagggtcactataaactgcaccattcccgtaaaactctgcaagtcctgctgtatcataacccgtgttgttggttgctgaggcaga

SEQ ID NO: 395 - DNA, 562 bp, Arabidopsis thaliana
cgaaacatacatagagcaaataaaggaagataatcattttactctttgtagatcacacatataacactcttaccaaacagtaagatctctttcttagggatcaattgatcttcttccaccttcccagcttctctttgcccttacgagttggaatggcgtgaggattctcctcgacagacactgccttaaatcctataggcaccaacacctcttcgaaggtagagacatctactttgtagggaggtccaccaacgtggtcggtaatcggatacatgagagttatgagttcgccgtcaggttttaagagttcatacatagatttagcccatgcaggtctcatctccggttcaatggcacagaagaacacataatcgaagatgaggtcgaataattcagtaggacgccacgtgaaaacatcttccttcacgaacgaaaagtactctgcctttggtgaggagccgtaagtctcattagctttcgcgagtgcgctttcggaaatatccaatccaacaacgaagcgttcaggacttgccatcgcaacgacgtcgtgtcctccaccaca

SEQ ID NO: 396 - DNA, 562 bp, Arabidopsis thaliana
  misc_feature (1)...(562): n = A,T,C or G
ccacgcgtccgccaccttctgtttcttgctcaccatcgcctacacgctcggattcacatgcattggtttcacatccttgctctcgtcatcttcctcctcacccttctgatatacccactggtcgtaggaaggaaagctaccccgaagagtattctccttgtcaagatttctcccctcctccttctccttcagcaccaaaacacgccgtcccaagaggcatcacacgtactgaaagtgctccagtcagaataccagctccaactttccagtccaaagaaaacgttgtggcaccttctgctcatctgaagttgtcgagacacgcttcgttgaagcctgtgagaaacttgggtcctggtgaatctggagcagcaatagataagctgtttctttatgggagagatgactttagaagaccttctggggtgaggccgtcttccagcagttctccgcggntatcattttcccggagttccagtagatctttccaagacgattttgatgatcctgatttcccttgcccatttgatgttgagtatgatgatattacagatcggaatagcag

SEQ ID NO: 397 - DNA, 561 bp, Arabidopsis thaliana
ccacgcgtccggtgaaagatgacgtcagagtgatcgagggtcctagcaaaggtaaacaaggtcctgtaaagcatatctacaaaggagtcttatttatatatgatcgacatcaccttgagcatgctggatttatctgcgctaaatgcacatcatgcattgttgttggtggatcacgttctggtgctaatagaaatggtggtgattcgctttcaaggtatggcaatttcaaggcacctgccccagtaccctcatctccaggaagatttcaacgtggcagaggcggaggatataataactctggagggaggcatgggggtggaagaggacggggagacgattctttattgggtactactgttaaaatccgtctaggacctttcaaggggtataggggacctgtagtagaagtgaaaggaaattcagtgcgtgtagaacttgagatgaagattgtgacagttgatcggggtgcaatatcagataatgttgcgacaacaccgtttagagatacatctcggtatagtatgggaagcgaaacacctatgcatccttcacggactccac

SEQ ID NO: 398 - DNA, 561 bp, Arabidopsis thaliana
cttttttttttttttttttggttaggataaatatctatcgattacactttatgtttatccctcgagaattatgtgatcacacttttgtatctctctgcttcaatatctatcacaaacgtaacaaccgcccccatcgcaaacggagaaaataatattcaaaacaaaaaaaggacaaactaagtcacagagagagagagatcaaatcccacacattaattcacggaagatatgtaattcaacgtaagaaaagagccaaaactttttcgaagaagagataacgttttgtgaactcagtcttcaaagtcacctgagttctccaatagatagttagctgccaattcttcatttcggtcacatgcgaggaacgcttctattactaaggctctatcaaatcccattgcctcgagccgttgaatcgcttcttgttctgctggggtaacgttaatggcatgtggcatttcttgctcgggttgatcgaacatgtccccctccccgtcagaaccctcatagggctcatttactaactgaagaaactctgcctggttttcttcggacgcgtgg

SEQ ID NO: 399 - DNA, 561 bp, Arabidopsis thaliana
ccacgcgtccgcaagcttcttcaccagcctatccgctcatcgtcaccttctccaatcaacaccagtgactcagcctccagctttaacattcccacctctgcccaaaaccactatgccaccggttccttctctaccaactccaggacaacaaacgttgccacagccacaaccaactctgccacagcccactgggttgccaccgatgccgagcacacagataccatcattgcccaaccaggtgcagcccacaatccctaacattccacagatcaacttccctagcaactttcccttcaactttcctttcaacattcctttccttactccaccaccttcaaagtaagagaagtgaaagctagctcattagctgtcacagatcattatccttctttcctgagacagctttggatcacacactctgctttgtgtcagtttgtatacacatatatgtattcttttgctgttgtttggtgtcatcgtcctctttgttgttgcttccataagtcaagttccttttgtaatatacattctaaagagtgatttcctttccactgcaaaaaa

SEQ ID NO: 400 - DNA, 561 bp, Arabidopsis thaliana
ccacgcgtccgcttggggcggtcccgcctgggagaaacgcgtccgatcctccgctcgtgtccgcacccgcaacggcgtctccgttctcgtcaccggggccgccggtttcgtcgggactcacgtctctgccgctcttaaacgacgcggcgacggcgttctaggcctcgacaacttcaacgattactacgacacctctctcaagagatctcgacaagccctcctcgagagaagcggagtgttcatcgttgaaggagacatcaacgatctgtctctcctcaagaagctcttcgaggtcgtccctttcactcacgtcatgcatcttgccgctcaagctggtgtcagatacgccatggagaaccccggctcctacgttcacagcaacatcgctggtttcgttaacctcctcgaggtctgtaaatccgctaatcctcagccggcgatcgtgtgggcatcgtctagctccgtctacggtttaaacaccaaagtccccttctctgagaaagacagaacagatcagcctgcgagtctctacgctgcgaccaagaaagctggagaagagat

SEQ ID NO: 401 - DNA, 561 bp, Arabidopsis thaliana
ccacgcgtccggaaacataaagcttgtggtggtgaagagaaggttgtggaagaaggatctattggttcttctggtagtggttcctctggtttgtctgaagtttatactctccctccttctgttcaagcaacaacaaacaagtccgtggaaacaagcccttcaagtgcccaatctcagcccgtgaatttgggcaaagaagcgagccgaaacatcatagaagacatgccatgcgtgtcgacaacgggcgatggaccgaacgggaaaaagattgatgggtttctgtatcggtaccgcaaaggtgaggaggtgaggattgtgtgtgtgtgtcatggaagcttcctctcaccggcagaattcgttaagcatgctggtggtggtgacgttgcacatcccttaaagcacatcgttgtaaatccatctcccttcttgtgaccctttgggtctcttttgaggggtttgttgtttcggaacaatgttacaaatcctcattatctccgaggtgtataaacataaatttatcgaactcgcaattttcagattttatacttaaaaaaaaaaaaa

SEQ ID NO: 402 - DNA, 561 bp, Arabidopsis thaliana
tcgagcggccgcccgggcaggtacattggcacactgttgattggactcggatacggtgcacactgggctattgtcccagctactgcctctgagctctttggtctaaagaagtttggagcgttatacaatttcctgacattggcaaacccggctggatccctcgtgttctcgggtatgatcgcgagtagcatatacgaccgggaagcagaaaggcaagctcacggctccgtgtttgatccagatgacgcccttagatgcaatggttctatctgtttcttcttgacatcactcataatgtctggattctgcatcatcgcttgcatgttgagtatgattcttgtgcgtcgtaccaagtctgtctacactcatctctatggcaagacccgcacctaagatctctgttcccttttatatatgatcgtgctcagcttcttattctttggtttttgtcttcaattctacgatccagatgttttcgtctctgtatcgatttttttgtttgtttctgtatcgattttgttgttgttgtcaattttgtaattgatttgtatgttttttgaa

SEQ ID NO: 403 - DNA, 561 bp, Arabidopsis thaliana
gaaaatttgatatataaaatcagagaaaatagtctttaagatccaaggacgattaaagatgaaaaaactcggggaaacagatattcttaaaattcgagaaacaattacgaaatctagaaaacaagctcatgtggtttcattccttgactcaatgagaacctggctccaaggtaaaccttgagctctgggacagcttcaatggatttgatcagagcagcatcaacggttttctggtcttccttcttctcctgtgggatctccttcttctcctctttctcagcttcgaagaattcgccttctgttttcttcttcttcttctcagcaacctttccaaaatacttgtcatcgaatttctcagtgttgactccagaaatgtcaacctttgtggaggttccaatcacataggcttggttaacacgtctcaatggaacaccattaatcttgaatggtcctgttacaagaagcaaaccagaagaaagttgcttgaggaagacaactctcttgcccttgaatctaccagcaagaatgatcaacactgttcctggagtggtgctggctttt

SEQ ID NO: 404 - DNA, 561 bp, Arabidopsis thaliana
tttttttttttttttttttttttttttttttttttttttttttttttttgaaagaaacatttatgagataaaaagcaatcaaacaaaaaattacatatttgccaaaaccaaaagcatataagtatttgtttaactattcttctaattgaattctaatcccaatcttcatcatttatctgccactcatcatcatcatctctcggcggcctaacgaccaaaacaaccattcctaagctctcattcactcctttctccttcaacaccaatcctctatccaacttcatcccaccatcagccacaacaagatagtagtatccattatcagcttccaccgtcttcttttccctatcgatcacaaccattatcgcctctcctttcccgttccacggtaaaacttccctatcatcgctaaacgaaatcgccactcctcctttcctaatcgccaccacgggatcccaacccggtaaaaccacccatctactccaatctttctctgcttccactacaccaaactctcctccactttcaaactccatcggtgcttcaagaagcttctcttct

SEQ ID NO: 405 - DNA, 561 bp, Arabidopsis thaliana
  misc_feature (1)...(561): n = A,T,C or G
aagttattgagtagaagatgaattttacaatatagatagccttttttggtaaggtatgtatcacaacactttatttatagagtttggttacaatgtatggaaatgtaaaattgaagttttcacttggggaactctacattatttattcttcaaggcattaaccatgatacttgggtttccgtgggaatgatactctactctcgaagacgcaccattattccccaacacactgatctagctgacagaaagttaagaccacttcaatgtcatgatgcaccaccacaaccgtagaaacttcagccggttttaagcggctttccaagcagacaatggtggtgtctcagcgttcttgaaagttggtatcatgttactgtatctatctcctttcacaaaacctggttgggcaatggcctcaagctcagtcatctcttcaggagtgngnnnnactgacaaagctccaatgttctgtttgaggttctcgatcttagtggttcctgggatanngcaaacgtcatctccctggtgatgaacccatgccagggctagttgtccaggagtgca

SEQ ID NO: 406 - DNA, 561 bp, Arabidopsis thaliana
cggccgccttgcagaagacctgggacccctgttcgaagctataatcagatgcgtacctgggccaaatattgaaaaagatggtgcacttcagatgcttgccacaaatattgagtatgatgagcataaaggacgcattgctattggacgactacacgcaggggtactgcgcaaaggaatggatgtcagggtgtgcacttctgaagattcctgtagatttgcaagagttagtgagctttttgtatatgagaaattctacagagtacctactgattcagtggaagctggagatatttgcgctgtatgtggcatagacaacattcagattggggagactattgctgataaagtacatgggaagcctctacctacaatcaaagtagaagagccaactgtgaaaatgtccttctctgtaaacacctctccattttctggtcgtgaggggaagtatgtaacaagcaggaacttacgagatcgtttaaaccgtgaacttgaaagaaatctagctatgaaagtggaagatggtgagacagcagacacattcattgttagtgggcgtggtac

SEQ ID NO: 407 - DNA, 561 bp, Arabidopsis thaliana
ttgcaaaatatgaagaagcaagcaagtgtaataatctctgaatggagaagtagtatttacaatcacgaccaccttgtaactacagacaaaactagagacaacccaaccatgtgtacacagttccagatctgagattcatcttgagaatgcagcccagatcaagaaaaaaaaacagtatagtgaatgtttcactgaaaaataatctctcaccctttacaaacaatctcactctatatctacaaaactattgtgatccaatgacttcttttgcacattctttaggtaatataagaacagagtctatgcatagcccacctttcgtgtgagtgcaatcgatttgagtcatggagaatttgattcctgttgatacatctggatttgtcactttgaaatctccaacgtgatagtgactccagctcccagggttgttgttcagataacacaatgatacagcttgttggttgtccgaagtggcgagctggaaccttacaggttttatgtcccatccatgaatgtgttcagagttgcagatcctccttccaagcctctttgatgttttac

SEQ ID NO: 408 - DNA, 561 bp, Arabidopsis thaliana
tttatgatcactttaacaatcttatttctgagcaatttaatttaaaatgtaaacagtacaagaagtagaagcaacactgaaaatgggaaaattcaaagaatattaatcaaagaaaaacatggaaagaaaatttaaaacattataaccaatcgaagagtggatagatatatcaagcacatacgaagccggaaggaaccttcttgccacaaacattgagaagaaggctgagagagacgggaacattaagattaatgcctaaaactttagcctttagggcggtgcagagacaagcggcagcctcaagatcaactaaaccattgaggagcgaacaacaaggcttcactggtggtgttcccaactgaattttgagaagatccttgagaacattggcgcaaacgccgagcttgagagtgtctttagggcagcttccggtggacttgggcttaggtttgggtttaggggtggaactgcagccaccgccacatgcggtggttaaagtgaaaaaaagaatgttgaatgtgaggaaaatgacaagagaggctgaaatttttgaagccattt

SEQ ID NO: 409 - DNA, 561 bp, Arabidopsis thaliana
atttatagatcaattaaaaaattacaagggggagaaaaagaaaatagctcttatagatcgatcaatcggatcactaagaattgtcacaaataatataataaatgaacacaaatcataacatatatggtgttatatacatctacttaaagtagatgaccggactattagatctcaaatcccacattccactttctttaaggtattcatggtatctagagaactccggtttagccgtcgctttcttcttgttatggcggcgataaccatcaaataaactgaagattggatggcttaatttgcttgtcaccactgttttagttggtttttggcgtggaagcttttccaaaatcacaggaaaatctccaccaagccttatcgatggagcatagtatggaacgctcgttgacctccttagctttgctccaagtaggctgaaggtggaatcatcgcttacacgctcatatccgccgcgacgactcctcgtcctcgtgcttaagtttcttagcatttgcatttctggattagttgaaggtttaaattgcttggaagagagaagtgacg

SEQ ID NO: 410 - DNA, 561 bp, Arabidopsis thaliana
tttttttttttacttaaaaaatgctcacttatgaaagaaatcataaacttccaagttccaatcaaaccagattcttattaccgcaaaccgaaaataaacaaatcaaaccaaaacatacttaattaaccaaccaagttacataaccaaacaactcaaacttcgtttaaattaagaaacaagttcgatatgagtcatatgacgatatgtaaccatcacaagattcatggtgttgcaacaacggaagatttgacagcggcgacggggaaatcgaggagaacgatcttgtcgatgacggcggtgaaagcggctgagaattcaacatgaagaggatggcttgtgaaggcgacgtaaccatctttgttctcaaaggtcatcgaaaatgcatgagtgaaaccttgtctaagcatatcgtgactctctttatcttctccccattcaaaggatttgacagtatcaatctgagaaacaagattctccaagcccttcaagatctcatcaacctttgtatcttccttaaacttcacaaccaccaaatgcttaaaccctgaagttgccattaat

SEQ ID NO: 411 - DNA, 561 bp, Arabidopsis thaliana
  misc_feature (1)...(561): n = A,T,C or G
cctctagagcggccgccctttttttttttttttttttttgaaggcaatagtgtaatgaaatcgttcaagattctggacttagtttcaagacagtaaaaataaaatgtttcatctctctgttattgcactaagcgtttacattgagatgtccgtacttttgcatgactctttttgtcgccatagcagctgcttcacttgctcgtaatgtgccttgtgccattagagctgcaaattcgcttgtaatctcttcctgaatcttggccctagcatcacccaacgggtcgtccttgaccttctctttactagctgatggttgaataacaggtggcactttctcagttgcagttgnnntttctgctgcctcgagcttaggagctatcacaatttgtgggccatcatctttactaaaagctccaaaaggttgtggctgtggcctaaactgtggaacttgaggaacagcaccagcctttagagttgtttcgaggccttgcaacataggcattataagaccacccatgggactgtttagaacatcattaggaagctggagaatgtagtcag

SEQ ID NO: 412 - DNA, 561 bp, Arabidopsis thaliana
ccacgcgtccgttgatttaaaaacagttggtggaaagcttactttgtaccaaacgaccctatgcgagagaatctcaggggataacattgatctcgggctagatctcgggtctcaaagctttttgccaacatacaacaaaaatgacatccagctgatatgctgtcaagctgatgcaagtgttttatggcttgtccctgacacagttgtgaccagatttattcaatcccttgactgggacacagatatggacatcacctttacttgggttcttaacagagaccgccctaaaggcaaggagactgtgaaatatgaaagaagtgtcgaccctctggaccttccaaaacgctctgatatccaaatggttctcaatgggtcgatggatggatttagagtgcataatttgtacccaaagttcttccgtgttactggttctggtgatgtcaggtctttcgaggatcagacggatgaagtgagtgcagacatactcattaaccatgcaaatttcaagtggtggtggtcattccataatcttaaagcgtctgaaaatatcagcgcttgcga

SEQ ID NO: 413 - DNA, 561 bp, Arabidopsis thaliana
ccacgcgtccgcatctgtttagtgcgcctttataattcaacgaccctttgtacttttccgattcctctttctctataacttcatctctcccattctcttcactcttctcaaaaattcgatctttagggtttttcttttatcctcttatcgctaatctggagctctatagagactataaagggtttttgattgattcgggagctcgagatttgacttcttttagctgattcggcaagtttgtatctagaaaggatcgattggtgaggtcaatagtggttggtgggttttagtaatggaagacggtgagcttgatttctccaatcaggaagtgttttcgagttcggagatgggtgaattaccacctagcaattgttcgatggatagtttctttgatgggcttttgatggatactaatgctgcttgtacccacactcacacctgtaaccccactggaccagagaacactcatactcacacgtgcttccatgtccacaccaagattctcccggatgagagcgatgaaaaagtttctactgatgatacagctgagtcttgtgggaa

SEQ ID NO: 414 - DNA, 560 bp, Arabidopsis thaliana
tcgagcggccgcccgggcaggtacaagagttacagaacaagaaggaacttagcggattgcgcggttgttgttgaggagctctggtggaagactctggatgctgcagctttaaatttgagctcagtcgccttctttgaagaagagaaacatgaaaccgcggtttcgaagtgggcacgagctaggacacgagctgctaaggttggaaaaggattgtcaaaagatgaaaaagctcaaaagttagctcttcagcattggcttgaagctattgacccacgccatcgttatggccacaacttgcacttctattatgatgtctggtcagcaagcatgagcgcacaaccattcttctactggttggacattggcgatggaaaagatgtgaatcttgaacaccacccaagaagtgttctgcaaaaacagtgcattaaatatctaggaccactggagagagaagcatacgaagtgatagtagaagatggaaagctaatgaataaacaaagcatgactctgatcaattcaacagaggattccaagtcaatttttgtacctcggccgcgacc

SEQ ID NO: 415 - DNA, 560 bp, Arabidopsis thaliana
ccacgcgtccgcttattcctcctctgcttcttcaagatccattgtctgcaatttcaatcccttgtctcgtcatggattccgtcttctctaacgttgctcgtgctcccgaagatcctattctcggtgtaactgttgcttacaacaatgatcctagtcctgttaagatcaatttgggtgtcggtgcctaccgaactgaggaagggaagcctcttgttcttgatgtggtgcgtaaggcagagcaacagctagtgaacgatccgtctcgggtcaaggaatacattcccattgttggtatttccgattttaacaagttaagcgccaagctcatcttaggtgctgacagtcctgcgattacagaaagtagagttactacagtccagtgcttgtctggtactggttcgttgagagttggggctgagtttctcaaaacacactaccaccaaagtgtcatttacattccaaaaccaacttgggggaaccatcccaaagttttcaacttggcaggcttgtctgtggagtatttccgctactatgatcctgcaacccgtggtcttgacttc

SEQ ID NO: 416 - DNA, 560 bp, Arabidopsis thaliana
ccacgcgtccgagcgtttcgtagaaaaattcgatttctctaaagccctaaaactaaaacgactatccccaattccaagttctagggtttccatcttccccaatctagtataaatggcggatacgccttcgagcccagctggagatggcggagaaagcggcggttccgttagggagcaggatcgataccttcctatagctaatatcagcaggatcatgaagaaagcgttgcctcctaatggtaagattggaaaagatgctaaggatacagttcaggaatgcgtctctgagttcatcagcttcatcactagcgaggccagtgataagtgtcaaaaagagaaaaggaaaactgtgaatggtgatgatttgttgtgggcaatggcaacattaggatttgaggattacctggaacctctaaagatatacctagcgaggtacagggagttggagggtgataataagggatcaggaaagagtggagatggatcaaatagagatgctggtggcggtgtttctggtgaagaaatgccgagctggtaaaagaagttgcaagtagtgatta

SEQ ID NO: 417 - DNA, 560 bp, Arabidopsis thaliana
ccacgcgtccgaagattgcaaatttctctctaaatatctgattcaaacgcatttggtaggctgagagaaagaaagaaaaagataaagatggatcacgcagcagatgctcaccgtacggatttgatgaccattacaagattcgtgttgaatgaacaatcaaagtatccagaatctcgtggtgatttcaccattttgcttagtcacatcgttttgggttgcaaattcgtttgcagtgctgttaataaggctggtttggctaagttaattggacttgcaggggaaacaaacattcagggtgaagagcaaaagaaacttgatgtgctctctaatgatgtctttgtcaacgctttggttagcagtggtagaacttctgttcttgtctcggaggaagatgaggaagctacgtttgtggagccatccaagcgtggaaagtactgtgttgtttttgatccgcttgatggatcttcaaacattgactgtggtgtttccattggcacaatttttggaatttacacgttggaccacactgatgagccaaccactgcagatgttctgaaacc

SEQ ID NO: 418 - DNA, 560 bp, Arabidopsis thaliana
aatccttaatctttctcttcttcctaaaaacagctttgagctttctctcagataaccacattttacctaacaatggctacaatcatctcctgctccgctctttcctcgatccgagcatcttccgaatcggatccagcccgtaagaaacctgtttcgtcggtttcatggtgggctcctctttttggcatgtcatcggaacctgattacgtcaacaaaaccgtgaatctggaatcagatctggataaagctgaaaagaggtctctgcgatgttgtctcacggaggagaaggctaagcagctgcggaggaaaaccgccgaagcttctacattccacgacgttatgtaccattctgcgatcgcgtcgcgactcgcgtctgacgttcgggtcaagaagtaactggatcgggtcacggatccagaaataatcaataattcgtcgaacttaaaatgtctctcttttatgggatgaagaataactttttgtttacgatgatactcaagaaccgctttattgtgcggcgtcgttttctgtttgtacggtctggatcgtgtatgatgttg

SEQ ID NO: 419 - DNA, 560 bp, Arabidopsis thaliana
gctttgtaagtgaagaaaagaaggagtttctggtcgaagctgatgttgctgaagacaaaggagctagacatactatggaagatgtttgggtggttttgcctgacgcttctttggatttcccagggacactaaggtgtgcgcattttgcaatttatgatgggcatggaggtcgtttagctgcagagtttgctaagaagcatcttcaccttaacgttctttcagctgggttaccacctggatgtcaaagttgctaaaaaggccattcttgaaggtttccggaaaactgatgagttgctcctgcaaaaaagtgtttcaggaggatggcaagatggagccacagcagtctgtgtctggatacttgatcaaaaggtttttgttgccaatatcggtgatgctaaggctgttttggcacgatcctctactaccaacgaattggggaatcatacagaagcaggtaatccactcaaagcaattgttttgacgagagagcacaaagcaatttatccacaggagcgctctcgcattcaaaagtcaggtggtgttataagctcaaatggacg

SEQ ID NO: 420 - DNA, 560 bp, Arabidopsis thaliana
ctttgtcgggatttatttttattgctgacatatatttttttaataattaaatacaaatggattacaaggaacttgtccaatgtaagaccaacctactacattaatctcaactatttgacgagggagatagagaattgaagagaaggatataagactttacagtgacactctaagactcaaaaggaggacgtcttttaggagatagaaccaaagcctccttctgatatttgttctatgccctctttcaagcagaaaactgaaaccatggtcgaaagatgggtgctgccgtgtaaacaactccaatatggtccgaatgaagatcttctggaatgaagtcaagaagctttctaagcggcgtccgctagctcttctgtgaactccccgaagatgtcggggcaatcatcccagttcctatgccctcgtgcttcccaataaccacccgtgtacttgaaggtgtcgctttcaccttgtctctcaaaccatctcggtctccaaccgctttcttgaagttgccgcgacattctttgccttctttctaaccgttgtttctctaagttcgc

SEQ ID NO: 421 - DNA, 560 bp, Arabidopsis thaliana
ttttttttttttttcagagggaacaaaattttacataggaacgcttaaccaaccaacgatattgtcaaacaagtcagtcaaaaatctttggatatttcttctgaagaactaaggaaagagcggtttactatgcactatttcgctcacaaaccggtgactttatagtttttgattatatcgatgtccgtccagtacattaacccaatcctgtgatccaccgcgcacaatattgtcccgggtacagtctcagaccagtttgctagagtgttcatttacgatggcgcctgtggggggatcttgatctggaccttgaccgcttcgacctggatttgtcatgagaagagtagagagtgttcttgtgctgagaatgcttgctatgtggtgaccgcgaagaaacatgtctatacaatcaaaacatatatgatactttttgtggtgagttttcttactagctactccgcttggcttacccattgtctttttgtcaaactttttgctttcaatagttctttaacttcacagagtctagtgctaatatagactaacaaacatatagaaga

SEQ ID NO: 422 - DNA, 560 bp, Arabidopsis thaliana
cgttctggtttacattataactcatgtcttaaaaagtaacaggatgtcaatatacaatgtcacttcgtacgatgatctctaatgtacatctactgatgaaaaactgagtgtggctctgtccgttgatctcaaaagctatagtttagcatccgcagatgattgaagtccgatgataccacatccaactctcgagcctgcgtttccagttgatttgctaagcttgtgccctcctttcccaaggtcatcaggatccgcatgcacaacaaccgccctcccgagtatggaatactgcccactaagcggtatatgtttgtctttgattaagatttcagcaacaccgtttgatcctgcaagaatgttacccaaatcgccagcatgacgctcttcctcgttcggtggcccgtgaactcgatttaatggattgaagtgaggtccagtagagatgcagccatttgtggtatcaccaaaagagtgaatatgaaatccatggaagccaggagagagtcctgagatcttcccggtgacatgagtagttccggaaatgtcttgtacgaattgaa

SEQ ID NO: 423 - DNA, 560 bp, Arabidopsis thaliana
tctttttgcttggaattaatattataacccttggatttaacttgaaattttacaatcttatggttctaatcaaaacacaagagtaaccagaatacttagatctaagctcgttctcctctgattcttctcgcgagctggatgtccttgggcatgatcgtgaccctcttggcgtgaatggcgcagagattggtgtcttcgaagagtccgacgaggtaagcttcagcagcttcctgaagagcggcgacggcactgctctggaaacgaagatcggttttgaagtcctgagcgatctctctgacaagcctctggaaagggagtttacggataagaagctcagtgctcttctggtacttcctgatttctcttaaagcaacagttccgggtctgaatctgtgtggcttcttcactcctccggtggccggagcagatttcctcgccgcttttgtcgccagctgcttccttggagcctttcctccggttgatttcctagccgtctgcttggtacgagccatgaggtaaaatgttattaagaaactgtttgattttaatttgaagatgag

SEQ ID NO: 424 - DNA, 560 bp, Arabidopsis thaliana
ccacgcgtccggaagctaattgacaagtatgatctctacggtcaagttgcgtaccctaaacatcacaaacaatcagatgttccagacatatatcgcctagctgcaaagtcaaagggtgttttcatcaatccagctatcattgaaccatttggacttactctaattgaggctgcagctcatggtttacctatggttgctacaaaaaatggtggtcctgtagatattcaccgggtcctggataatggccttcttgtggatcctcatgatcagcagtctatttctgaagctcttcttaagcttgttgctgataagcacctatgggcaaagtgtcggcaaaacgggttgaagaacattcaccaattctcttggccagagcactgcaaaacttatctatctcgcataaccagcttcaaaccaagacatccacagtggcaaagtgatgatggcggtgataattcagaacccgagtcacctagtgattctttgagggatatacaggatatatccttgaacttaaagttttcatttgatggaagtgggaatgataattacatgaacca

SEQ ID NO: 425 - DNA, 560 bp, Arabidopsis thaliana
ccacgcgtccggaagaatcatattttagctgttgtgtgtgtgtgtgtctgtctcccttagtaaataaacaacatcacttttgtggttattgtgtgttttagtgtaccaaaggagtatgccaagaagttgtaataaaaccattgtgcgtaactgaaactccaaattgctatgtaagtaatccaagtatcttgccctctcttaaccgttaaaccatttgagaaaatatatatatatatgtatacaaggttgcttttgcagatttatcgatatttgctaactacgtactgggtcaatgacgtgaatgtacgcaaagctcttcaaatcaacaaggtaccagtttgttttttaagttcatggtaaaaagaacattgtcattcttataggagggcctatgattgcaggagagtataggggaatgggtacgatgttattttggtattccttacactcatgacattaaaagtagtgtaccttaccatatgaataacagcatcaatggttatcgttctctcatttacaggtcagagtttaacctttttacgatcatcgttgtccctaaa

SEQ ID NO: 426 - DNA, 560 bp, Arabidopsis thaliana
  misc_feature (1)...(560): n = A,T,C or G
tggttctcttcaagtacaggactttcaagaaagcaagagccatggagagatctaagtggactctaatgtcgttccacaaactcgggttcagtgagcatgagattcttgaaagcttggatgaagataatgtgattggagctggagcttcaggtaaagtttacaaggttgtactcaccaatggggaaactgttgcggttaagcgtttatggacaggttctgttaaggaaactggagattgtgatccagagaaaggttacaaacctggagttcaagatgaggcttttgaagctgaagttgagacattgggtaagattaggcataagaacattgtgaagctatggtgttgctgttctacaagagactgcaagctcttggtttatgagtacatgcctaatggtagtttgggagatttgcttcatagcagtaaaggaggaatgttgggatggcaaacgaggtttaagattatcttagatgcggcngagggnctttcgtatcttcaccatgattctgttcctccgattgtgcatagagatattaagtcaaacaatattttgatcgat

SEQ ID NO: 427 - DNA, 560 bp, Arabidopsis thaliana
tttttttttttttttttttttttaaagcaccattgaaaatttgaaatatatcaagaagattcagatggaagtttttttaacattgtcaaaaggagttccaatcgaacaaagtgtacattttggaagctcttaaaaaaagtagaaatggcttagagagtgggagctctctcggcagttccagcgatgacggtaagcaagttgtttccaaaaggatcactgagatgctttgcaaggttctcaacaggaccttctccggtaacatacgcttggataaagaaaccgagcatcgcaaacatggctaatctcccgttcttgatctctttgactttgagaagagctccttgctcagggtccttagcaaggcctagaggatcaaatggacctcctgggtgtagcttgtcctcgaaatccaatccgttggtgattctgtagtactcggctccaccgaggagaacaacctcagcaactacggcgagaacaaggttgatagggatgttcttgccaaagtagttcaatgtgtttccatcaagaagcaaagcaccagtcttaaaccagacagc

SEQ ID NO: 428 - DNA, 560 bp, Arabidopsis thaliana
ctgtcgtgttgagtactaattcgccgtcgtttttctcagtgaaggagtggtgagagatgtcgagtctcgaagatatcaagaacgagactgttgatctggaaaaaattccgattgaggaagttttccagcagctaaaatgttcaagggaaggattgacaacgcaggaaggggaggacaggattcagatctttggccccaacaagctcgaagagaaaaaggaaagcaaacttctgaagtttttggggtttatgtggaatccactttcatgggtcatggaaatggctgcaatcatggccattgctttggccaacggtgatggtaggcctccggattggcaggattttgttggtattatctgtctgttggttatcaactctaccatcagttttatcgaagaaaacaatgctggtaatgctgctgctgctcttatggctggtcttgctcctaaaaccaaggttcttagggatggaaagtggagtgaacaagaagctgctattcttgtcccaggagatattgttagcattaaattaggagacattatcccagctgatgcccgtcta

SEQ ID NO: 429 - DNA, 560 bp, Arabidopsis thaliana
tttctttccgattctcggatttttcctgggaatcaaacgcatcgccgagaatcggaagagagggataaggttatggctcctcatggagatggattaagtgacatcgaagaacctgaggtcgatgctcaatcggagattcttcgaccgatctcctcagtcgtcttcgtcatcgctatgcaagcggaggctcttcctttggtcaacaagttcggactctctgaaactactgattcgccgcttggtaaaggattgccctgggttctgtatcacggcgtgcataaagatcttcgaatcaatgtagtttgccccggaagagatgcagctttagggatcgatagtgttggaactgttccagcttctctcataacttttgcttccatccaagcattaaaacctgacatcataatcaatgccggaacctgcggtggcttcaaggtcaaaggagccaacataggcgatgtattccttgtatctgatgttgtgtttcatgatagaagaataccaattccgatgtttgatctgtatggagttggtctccgtcaggcattctcgacacccaa

SEQ ID NO: 430 - DNA, 560 bp, Arabidopsis thaliana
  misc_feature (1)...(560): n = A,T,C or G
tattaagattaatatgtatatatgtgtatacaatgataaaagaagaatcataagctctaagtaaggcttaaactaagacaagaacagagacataacaagacccttcccacgagcgactctctttcgaccttactactcgaatatattgcaagaacctacagagcaatatgttagagagctgtgaagtaacttcttggctgggttcttgattcttcaactgagccaagaactcgaataaatcatctgcaaatctgnnaaattcaaccaaaatccaccaagccctctcaactcagtatttcgtctgtaagaacctcccgactcttttttttgtgcaacctcccgactctttctgacaacaaacctgagagattatgaggttggtaataatccataccatcgcaggttcacttttcgctttggttatctcctatgaaccgttaaccccatttagttgatgccttggcgtggtttttacttttgttcttctttaagagcattgacatgtggttaagatcattcaggcttgacttggactcgccttgtaaccacaacaaagcctc

SEQ ID NO: 431 - DNA, 560 bp, Arabidopsis thaliana
gcggccgcggagaatcccagaaaatacagagagtgcttgaggcgttctctgaaagatactatatgcaatctcctgagattctggccaacaaggatgctgctcttgtgttatcatactctattatcatgcttaacactgatcagcacaacgttcaagtaaagaaaaagatgacagaagaggatttcattcgcaataataggcatatcaatggaggaaatgatctacctcgagaattcttgtctgaactctttcactccatctgcaacaatgagatcaggactactccagaacaaggtgcaggctttcctgaaatgactcccagccgttggattgatttgatgcataaatcaaagaaaactgctccatatattctggctgattcaagggcttatcttgaccatgatatgtttgctatcatgtctggtccaaccattgctgccatatcagtcgtttttgaccatgcagaacatgaagacgtttaccagacatgcatcgatggattcttggctatagctaaaatttctgcctgtcatcatcttgaagatgtgcttgatgatctg

SEQ ID NO: 432 - DNA, 560 bp, Arabidopsis thaliana
  misc_feature (1)...(560): n = A,T,C or G
ttttttttttttaattaatcaatgaccaaaatattattaagataaaacaacaaccaacatcatatacatgtcacagtacggctgaaccatgcttgtattaataaagtaattccaaagactatatttcttattacattattagaacctggcttgtaaattcctgaccgcattaacatccatttggaatgctcttgcaagaacattcgggtctacatctggtttagacccaaatattgtgttagcaattgtgataacacctgcgttttggctgctcaaagcagcgattgcaactgctggagtncctcntangttgaactggaaatggatgagtccttctggaaacacaaatacgtcacccacgttgagtgttttggcgaaaagacggtttccgtcttggtttgatgagataaaccctacaagtagagttccttgttgaacaaccaagatctcggtggcacgtgggtgggtgtgaggtgggttctgaccgttgggtgcatagtctatacgaacaagtgagataccaagagtgtttagtcctccaaggttgttaacattgacgg

SEQ ID NO: 433 - DNA, 559 bp, Arabidopsis thaliana
cacgcgtccgaaagccactcatttgtttcatcgatcctacttcctcctgtgtcactgcaatcactcgctcgtccttttctctatttcttcaccgatcgaatcaatcagagatggagcatgaatctatcaccgctcgacgcaggctcgctgccttcgccgctcacttcccggcaaccagttacgattccgcctccaccgcatctctcgtccccttgaactgcagcagcagtttgaacactgtcatccaaaggtgtgacaacaaaatctcttttgcccggcaagcatcatctgaacagggctttttttatgaggccagcttcacccgatgatgtccttgagaacttaggtatgaatttgaagaacactgtcgttagaaggggtgacaacaggctgtattttgctcggcaagcatcttctgcacaaggtttttttatgagacaggcttcgactaatgagaggaccataccacatgatgctgctgcatctaccaagttttctgctaccaaaacaactggcttcgattcttcttcacctgcgtacgctgcaccacacttttcta

SEQ ID NO: 434 - DNA, 559 bp, Arabidopsis thaliana
aagcccgagccgattggtttgctaggaaacttgagttatacaacatacgcatcataaaccaactaatagtcctttagccagatcaaacaagtaataataactcatacgacaaaatatagtctccaatatccaactacaaagaagaaagacaagtgactgcgtttagtcaaacaaaccgaaacccaaatctccgtcactctcttctgctggctcatccttcttcttctcctcagcagcaggagcagctgccgcaccaccgccagcagctggagcagcagctgcaaccggagcaccacctccaccaccagcaccaacgttcatgatgagatcagtcacgttacgtttctcagccatcttggcgaatagcattggccagtatgactcaatactaacaccagcagctttcaccaaggtcgcgattttgtcagccgtgatagcgataccctcgtcctcgaggatcataacagcgtagctgcaagcaagctctccaactgtcgacatttttttatcctaagagtaagatcgaaaatgcttttcgcaaggcggcgagagagacaaa

SEQ ID NO: 435 - DNA, 559 bp, Arabidopsis thaliana
tttttttttataaacttaatcatcgacttgttatattagcacattaaacataatatgatcatataatacaataatataggcaaatgtttgatagcggaagcagcaaacagaaaatacataggcaaatatttgaagttactgattcagatgagactatcatttactctccgagagaggggactggggcggaatcggaggccggctgcacaatatccgaggggggcggggcgaagagtgaaagattgtcgattatgtcagtgattgcaccccaagataaatcactttctaaacgtgctgtttcttttccagtttggaagacataggtttcagacaatcgggccagttgatcatccaatatagtgcatcggtcaccgcacaacgaggatgttaccgtaaccactataggaagttgagtcgtggtcagaataagtcgccattcaacttcgttactcaaccatgtcacttccccttgactaaagccactacccaccaagtacattagcattactaaaccgtaaagaacctttttctccattgatcgatagtatatctttttctc

SEQ ID NO: 436 - DNA, 559 bp, Arabidopsis thaliana
tttttttttttttcattcaacttgaagtagaatagtctcaaagagccatggttgactgatcaaccatcgccttcttcatccttttctttattttctacattagtcatttaattcattcattatatatacttctctctaatttcttaatcatctcttcttatagtttttaccctaaagaaaatggcaaccgtcgatgtcatcaacggtgattcaatctcaactcttcattctgacataatccaaacccaaatcttgacccgactcgatggtccgacgctagcctccaccgcaacaacctcttcttacctccaaactctatgcacggaagagaaactctggcaagaactctccatcgacacgtggccttcgatcaatgatccacgtgttgtccaagctatctcctctttcccttccggttaccgttctttctttgctgactcgtacccgttcactgaacacacgtggcagtctgaaaaacatgatccaccgacgggattaatctcagccgttgatttatactacagaggagagattatatactcgaaggtacaagagatgg

SEQ ID NO: 437 - DNA, 559 bp, Arabidopsis thaliana
cggccgcatttggcagagagagaaaacgttggaggaaggattgatatttgttggactttggatcgaaaaattgaaaggtaaaagaggtagagaagctctggattccgtctcttcccgtcgtcggcgacggtggttttgcccgttggctctgaggttatatcaggctttaatttaagtggattgtcatcttctgagatatggaacaagtttttgtctggccaagctgctaccactatcggcttttctcattccaagaagcgctcgattggcggtttcttgtacgttctgatttccttgtgggctctttcgttaactgcacttagtggtcaaaccctcttctatgatctttaggggaaggtgtgaggcaaatttctgagacagggctgaagtctgcaaattcttccttcgcatagtcctagagaaacctctttgttcctctctttcatatcttgttcttatgggtgctggttgaagaaagatacatcaatttcttttctttttcagtttacaaatgtcgtttccttgagtctgaacccctgagtgagatgttgtgagcata

SEQ ID NO: 438 - DNA, 559 bp, Arabidopsis thaliana
tcgagcggccgcccgggcaggtactccgtatcccccaaatcgttctctctcaaatcgcaaaattagggttagggttttcaattccccaaccttgcgaatttctcatttctcgtagccgccgcagcaatcaacgatgacaggcaaagcaaagccaaagaagcacacagcgaaggagctccaagctaaagccgatgcagcgttgaccaatcgcggtggaggaaaggcagggctcgccgatagaaccggtaaggagaaaggtggtcacgcaaagtacgagtgtcctcactgcaagatcactgtaccggatctaaagacgatgcagatccatcatgaatcgaagcatccaaagctgacttatgaagagccgaggaatcttcatgaggctttagctgctcctgctgaatcatctaagcctaagcctggaatcagaggaagccttaagaagtgaagtgaagatggtttgggattgtatcgaatttcgatttgaaatttgtggtctttttaatggtgttttgatgtgagaatataaacttgcgttgatgatgctctatgtcttcgt

SEQ ID NO: 439 - DNA, 559 bp, Arabidopsis thaliana
ggctcagaaggagagagttcgaatcctttaccgtcgtgcccttaaggatactctcaattgggctgttcatcgccatatcttctaccgtgacgcttctgatctgcgtgagaagttcaatgtcaaccaagatgtggaggatgtcgacagaatcgacaaactgattgctcatggtgaagcagaatacaacaaatggcggcaccctgatccttatatcgttccatgggctcctggtggctcaaagttctgtagaaacccgactccgcctgctgggattgagattgtgtacaactatggtctagaagacaacccataataaacctagcttccatattgtcacacccatcaataaaattgaagcatccggtggctatggtttggagataaattaaactgactttcaaggttgaaactttgagggaccaattgttattttcaaagatgtttcgttccagtaagacaattcttgtttcaacttggtttatatctttcatctaaaacatttccggctgctcttgagtcatggatgttcgaccatgaaaacttgtcagtaaagcggccg

SEQ ID NO: 440 - DNA, 559 bp, Arabidopsis thaliana
aaggtacacggctttggttgctaaggacgcaaagcaggcagcttcggacatgtctaaggttctgcaagtggagatagagccagaacaacagaaattggaagagatctcaaaggagaagtccaaggcctttggattgttctcaaaggaattcatgagtcgccatgggcttcatttgctaggcactacatcgacatggttccttctcgacattgctttctacagtcaaaaccttttccaaaaggatattttcagcgcgatcggatggattcctcccgcgcaaagcatgaacgcaattcaagaggttttcaagattgcccgtgcgcaaacgctaatcgccttgtgtagcacggtacctggttactggttcacagttgcgttcatcgacgtcattggaagatttgcgattcagatgatgggtttctttttcatgacggtctttatgtttgctctggctattccttacaaccactggactcacaaggagaaccgaatcggatttgttatcatgtactcgttaacattctttttcgccaactttggacccaatgctacaaccttc

SEQ ID NO: 441 - DNA, 559 bp, Arabidopsis thaliana
  misc_feature (1)...(559): n = A,T,C or G
agggtaaccgagaaagatcgatcaaacttttctgtgttccgacttacgatattgatcttatctggcacacacatcagcttcatgctatctcttattgcaatgatttgactaagatgattggtaaggtcttggagcatgatgatacagactctgaccgtagcaaaggtaagaagcttgatactggtttctctggaactactgctcaatgggaagaaacatttggtcgaaggtattggaaagccggtgctatgaaccgtggtaataccccaaagccagtcacaacttctccttatgtttgttctggaaagaaatcaattgcgaaagaggaagagtcccagaatgtaatccaatatccagaggtgaaagtcattgaagttatcttggagattgttggggttaagaacttaccagatgctcacaaaggaaaggtctttgttctgttcagcaaaactcaaccagattctctgtttaacgctgagcgtanncttaccgttttatctgagtcttgtggggaaaagcaagttgctttgttccagtgtgagcctacaggagagcttag

SEQ ID NO: 442 - DNA, 559 bp, Arabidopsis thaliana
ccacgcgtccgagagttcccagtcaagtttcaagtcaaccagatttactggagtttggacaacttcagcagttatttcactttagagacagaggttcctgggagctaccttttctacaagggtggttgatggctcaaagccaagctggtgctaattcagtggctcttcctactggtagtagtggtcacgtcaactcaactccttatatgggttcttcttcagcatctcattcatccacagccagtctagaggctggagtagcgtcattagaaattcctggtggtgttaacttatatggggtttctgcaagaggtgactcccgggaccgaattctacagtcccgcttcgcaggatctggtttagcagaaggtcgttcctctcgtaacactcaacatgaaggagctgatgctcaacctgtggtaaacagaatcccttctgaactggctagttcaattgctgctgcagagttgccttgtactgtcaaactgagagtgtggtcacatgacatcaaagacccatgttcaatactgaagtctgacaaatgtcgattaacaataca

SEQ ID NO: 443 - DNA, 558 bp, Arabidopsis thaliana
  misc_feature (1)...(558): n = A,T,C or G
actcgatcagagagttcagccaaaaggaaattgacagtgagcaagacgacgctagagccagcgataacaccgagcacgacgccggtagttccgagaactttctgaaacgccggccactcaatctccttcacttcctcnnnaactccactaagaaactcgttcttccctttctcttcctccgccgctttcctctgctccatcgctgcttttatctctgctcctatcgcgttaatctccacttccttatcttttccgcttccactctcttccgccggtgacggagtcgcttctgattccgattcagatccagctatctcgtctctgttctatagccttagccacaaaacacgccgatttcctcagattactcgtcgtcatggttctaatctcagtgtaaaccggaaatacacggcgagtggacagtgacggtttcgtatcccggggactcctggttattccggtgaccggcggcgagaattgtgcggttagtgacatttttcgaaattgggaacttttttaagttttctcaattttagatttgtggataattccggacgc

SEQ ID NO: 444 - DNA, 558 bp, Arabidopsis thaliana
ctgtatatttcctctaacactctcgaattcactccctaacttgtgatttaaaacaagtcttctcaaattttgttcatctccagctacaaaaaaaatggcgcagcaaaagttccttcaccagcgaccaatccaaaacccattcacaaacccattctcttcttctcctctttccacttcttcaatctcaaatcgtccaatctctctactcagccgcaacggtctcctcctccttctcgctctcctcgttatcctcggcgtattcttaccctgggcaggatctcctttattcccgtctccaaacaaactctctccttctcaatccaaatggcgcgactattccctccctcaagctgtcaaattcgtagctaagaacgggactgtgatcgtatgcgccgttagctatccttacttgccgtttctcaacaattggttgattagtgtttctagacagaagcatcaggatcaagttctcgtcatcgctgaggattacgctactctctacaaagttaacgagaaatggcctggtcacgccgttctcattcctccggcgctcgattc

SEQ ID NO: 445 - DNA, 558 bp, Arabidopsis thaliana
  misc_feature (1)...(558): n = A,T,C or G
ataagagcatggagaaaatacacgaggaagaaggtattgaaccggaccagttaatgggagacgttctatactacggagacaaccactctgcggtggtgcagctgcacggccgacctgacgtggaaaagctgatcgacgagaatcgcactggaggcaagctgatcgtgcttgacgttggtctaaaacattgtggtccttgcgttaaagtgtatccgaccgtgctgaaactgtcccggtcaatgtccgagacagtcgtattcgctagaatgaacggtgacgagaacgatagttgtatggagtttctcaaggacatgaatgttatcgaagttccaactttcttgttcattagagacggcgagattcgtggccgttatgttggttccggtaaaggagaactcattggagagattcttcggtactcaggcgttcgtgtcacttattaatttgtatcaaaactttaattntattacatctcacttcaaaaaagaatgagtttttggtctttgtctgtaccatccgaaaccggttgatatgaaagaaaaaaaactcaaaatagtg

SEQ ID NO: 446 - DNA, 558 bp, Arabidopsis thaliana
gcggccgcaaaaataattagataaaatggattcgaccttgtcacttgctaatgagagcacaaaatcaggataaatcccaataccaattatgggtaaaagaatagagattgaaagaaataactctcggggtccagaatcaaaaaaagaaaagtttttgatattaattaacttgtatccatagaacatttggcgtaacatagataataaatatataggagttaatatcattccaattgccattacaaaaataatgaaaattttggaaattaagaaatatttttggctggtaattattccaaaaaaaacaatgaattctgcaataaaaccactcatgcccggcaatgcaagggaagccatcgataaaatagtgaacattgtaaatatttttggaatggagatagccattccacccatttcatcaagataaacaagcctaattctatcataactcgttcctgccaagaaaaaaagtgcagcgccaataaatccatgagaaattatttgtaaaatagctccattaagtccaggatccgttatagaactaatacctataattat

SEQ ID NO: 447 - DNA, 558 bp, Arabidopsis thaliana
ccacgcgtccgacggaaacgtaacggtgtcaagtaacgatctaagctttcacggtggaggactttctttaagtcttggtaatcagatccagtcagctgtctctgtttctccgtttcagtatcattaccagaatctttcgaaccaattgagttacaataatcttaatccttctactatgtctgatgagaatgggaagagcttgagtgttcatcagcatcactctgatcaaattttaccttcctctgtttacaacaacaatggtaataatggtgttggattctacaacaattaccgttacgagacatcagggtttgtgagtagtgtactgagatctcgttaccttaaaccaacacaacaattgcttgatgaagttgttagtgtaaggaaagatttgaaattggggaataagaagatgaagaatgataaaggtcaagactttcacaatgggtctagtgataacattacagaagatgataaatctcaatcgcaggagttgtctccttcagaacgtcaggagctacagagcaagaagagcaagcttttaacaatggtggatga

SEQ ID NO: 448 - DNA, 558 bp, Arabidopsis thaliana
agattttgtgacaattctaagtcttatggaaaccgtaatacaaatcctctaacgcactaagttcagattttaaccaaaggtgcatgacgacgataaggcagaagagaagattgtcctcctcacacaatttgatttctttccttttcaatgcttttttaagcactttgagacttttggagtattttgttgaagggatctgatcatgtcctcttcataatgtatcccaggattaaaccgattaggccgaccagaagaacgtacatgaaagggattccaccactcttacttctcttgctttcgcgcctcaactggtccaattcttgttgaagcctgttgttcagttgaaccgcagagttcttttcctcggtgagttttgtgaccagagctcttgcctcagatgaattatcctgagcatcaaccctgtctgcgctaaatcttggagcagcagtaaaatcagaagcattcccattatcagagacagaagccctcggtgaagagccctcttcagatccttctcgaaccggtgatggtggtcgtggtggagcaacatagacaact

SEQ ID NO: 449 - DNA, 558 bp, Arabidopsis thaliana
ccacgcgtccgaataaacaagataaatggagggtctaattccgttagtatacaaagccgtcatgcaaatccgttacggtaacgagtcgcagcaactttcttcttcttactacgttcgtcttcccggtgattcgggtcggtttgtaagatccgatttagatgtatcgggtcctggatctaattcctccaatagggcgtcgtcgtcgacaagcacaactacgtttgctgtttacgcgggagtccagtcacctgtttctcgtcaggttgtcacgtgattcacacgcgctttttgaaggaacctgaagttgcgtgtgagggaagggttcgtgacttttgttttgtgcgttttttttttgtaagttaggcttggaccggtttaataaacctgatgtaataattcggtttggaaaattgatttctctaagcgtagactttaacccaaaagggtggtctcgtggcttttgatttgtcaattgtgtgttttcttttaattgtataaagtttctatgaatatatttagtttattcgagaacaaaaaaaaaaaaaaaaaaaaaaaaaa

SEQ ID NO: 450 - DNA, 558 bp, Arabidopsis thaliana
ttttttttttttttttttttttttttttccataaatcacaaatttcacattcaaagtctcagaaatttacattttatccctcatcatgacctagatatggcacaaaatttacaaaaaaaaaaaaaaacgaattaacgatgcaaaaggcaaaagctaagattttttaaatacatcattgatcagaacaactcctaataatccaatcccaattccaattttttccaatattactcatcatcaagtagagttatgatccaacccgaatacccgacgcaaccgggtcagatgctgcaaacagttcttcagaactgttcacaataagacgatcctctgtttttctcttcccttcctctggttttgtcaatgtgtctcaccgttactttcactactccgcggcaccacctgatcacttccctccacgtcatcatcttcatcgtcatcatcgtcacaagtacacgtttttaccgacggcgttgctaagtaagtaggtttgacatttccggccataatcaccaagaacttctccggcaaagctacaggcttcaccgccgttttgtc

SEQ ID NO: 451 - DNA, 558 bp, Arabidopsis thaliana
tcgagcggccgcccgggcaggtgatttttatccaaatcttccaaagcttagctttttttttcttttcaatttctctcttgcgttttcgattttattacaagaactttgttttgggcttcatccatcgttcaaggttcgttgaaaactatgaagaaagttgagttttttatgctccttctctgcttcatcgcagcgtcatctctagtgtctgctgatccaccaacatgtcctgctgatttgggaggcaagtgtagtgattctgatgactggcaaggtgatttcttccctgaaatccccaagattaagtatgagggaccttcgagtaagaacccacttgcttacaggtggtataacgctgaagaagagattcttgggaagaaaatgaaggattggtttagattcagtgttgcgttttggcatactttccgtgggactggaggtgatccatttggtgctgctactaagtattggccttgggaagatggtactaactctgtgtctatggctaagagaagaatgagagctaactttgagttcttgaagaaacttggagttgat

SEQ ID NO: 452 - DNA, 558 bp, Arabidopsis thaliana
tactcgtaggtcatgatggttgggttgggttatttagcgatagctatgtgattaaagaggagtttgcatcattgaggttttttcttgctgcctctataactcttgattcaatccaaggagttttatcaggagttgcaagaggatgcggatggcagcgtttagtcacggttataaatttggcgacattctacttaattggaatgccgattgccgccttttgtggtttcaagttgaagttttatgccaagggtttgtggattggtttgatatgtggaatattttgccaatcatcatctcttttgcttatgacaatattccggaagtggacaaagctgaatgttgctacggtctgaaaactctagttacgttccatttttctacggaggcacatttattttcttaagcagatatggaatcagttatcaagatatatatttggaactcatgatcattttccaaacgcttagttaagatttatctttcttagttttctttttattcttttggagtgtaagggaaataatctggttcacaaagttggtcatggcttgaatatta

SEQ ID NO: 453 - DNA, 558 bp, Arabidopsis thaliana
  misc_feature (1)...(558): n = A,T,C or G
ttttttttttttattttttaaaacaattttaaaatctgatagtaattaagcattttagtcgttaggatgtgttaaaattataaggtactaatacagtatgtaacaaaagttttaccactgccctccgtgcactgtgnnnagaaagatagaaactacttgcctccgccaccaaacattcccatcatgtccttagccgaacccatctgcttcatgagactctgcagaccgctcatgccgcccatctgttttagcatctgaggcggtatgaccttgctcatgtctccgttctttgggatcttgatccctttcattgtctttgctatcctcttgtactcttccaacatctccatcacttctcttactaacctccctgaccctctcgctatcctcattatccttgactcgttaaaaatctttgggtttgggctgtcaagttctttatttgnnntagaatccatcattgnnatgtatcgcttcatcttcactcggctttcttcaccatgtcctttcggcatcatttcagcactaattccaggcagcatcgagaaaagctgatta

SEQ ID NO: 454 - DNA, 558 bp, Arabidopsis thaliana
acgattactaatggatcaaacaatacgaccggtccgatgcgtccgatcgaaagttcgagtcgcactgatgtttcgacattggacagcgacgtgtcatcatcaagtaacggagttagcgaggcggatatgacggcggcgaagtcgatttacatagtctctgacggaactggatggacggcggaacacgccgttaacgctgctttgggacaattcgactattgcttggtcgaccgtggttgtcccgttaatacacatctcttctcagggattgaagatggggagaagttaatggagatcataaagcaagcggcaagagaaggagcaatggtaatctacactttagctgatccatcaatggcagaagcaaccatgagagcttgcaagctatggaaaatcccatcattagacattcttggaccaatcacagagtcaatctcctctcacttaggcactaatccttccggtctttcacgtggcataacaaactcatctctcaacgaagactacttcaaaagaatcgaagctatcgaattcactatcaaacacgacgacggtgcc

SEQ ID NO: 455 - DNA, 557 bp, Arabidopsis thaliana
agagaaataatattataattatcttatatgttgaagaaacacgagaggaatcaacttaatcgaaatgttacggagacgtaatattcaagataaaacaagactgaatgcgaaattccaaggaaggcagaaaagcaaaggaatggtggttagtcgagagactattgagccccgagttcaagaagtagagtgtggctgagagagtctgaaccaggtccagtgaattggatcggacctaggctgatgtatcggttcttcaatgcccattcttcacgcagtgatgcgaatttcttaaatggtgcaccttcaagttccaccattgctttcttgatcacaggcttgaacttaccgtgtctcctctcgacatccatcaaggctgtgagagcagtcccacctacagtccattcttccacaggagcagccaagttcccaaccgaagaaattagtccggtcttcccactgttgaggagtactccagcgccataaccaagtgcataacagtatgtggcatcaaaatttgtgggcaagccgcatcttccttcatacccgaagaaatgtga

SEQ ID NO: 456 - DNA, 557 bp, Arabidopsis thaliana
ctttttttttttttttttttttttttttttttgagaatgaagctgagtttgaaacgcggattagtgcctcaggtaagagcgagagcgggttttcaaacctgctcctccttagacatctctccaaacgctgtaaccggaaagtttctcacatagtgcacaaatgacaaaggggaaaaaaatttgaaacaaacaaattggagaaatagaaagaaatgtgatcccgtcatggaaacgatgtctctttagtttagaagcattttctgtggacaatgcctggacctgcttcatcatactctgccttagagatccacatctgctggaaagtgctgagggaagcaaggatagaaccaccaatccagacactgtacttcctctcgggtggtgccacgaccttaatcttcatgctgctcggggcaagagctgtgatctctttgctcatacggtctgcaatacctgagaacatagttgtaccaccactgagcacaatgttaccgtaaaggtccttcctgatatcaacatcacacttcatgatcgagttgtaagttgtctcgtggatc

SEQ ID NO: 457 - DNA, 557 bp, Arabidopsis thaliana
ccacgcgtccgatcgatcacgatccagagcactaatttgtttgcagcattggacactcgtaagaagaagaagaagtctgacaaggcagggaagagcaaagggtcttctaagtcacgagagccagagaaggagcctgagcctcaggtctattgggctcctacgcctttgaaagttaagtcttgggctgatattgatgatgaagacgacgatgatgactattatgcaaccactgctcctcctcagtctggttggagtacttctctgccttcccatactgattccaaagacgttcatgttgaggaaagtgaaagtgaggaagatattcttgatgaaggtgatgatgatgtggaggaagagcaggaacaggaaacagaggtacaggttcatccagagcctgaggtgaagaaagctcctgaagttcctgcacctcctaaagaggcagagaggcaactttccaagaaagagaggaaaaagaaggaacttgctgagcttgaagctttgttggctgattttggagttgcccccaaggagaacaatggcctagaggaatctcaaga

SEQ ID NO: 458 - DNA, 557 bp, Arabidopsis thaliana
ctttttttttttttttttttttttttttttttttatataaaatctataatattagtaggctttatgataaattgttactacaaccactccgaagcaactattgcccgcaaacgcacctgtttccaactgaaatcagaaaaagtgccaacaagatatccataacaacacaaacaaaatcacatagaagactctgtttcaagttccaacaacacattattcaaaacccactctttacttactcacttactctcttctgctaagattagccaagctcatcaagaattaatcccctgacgataataatgatcctacagcctcctccatgctcttcccatttggattcttgttccattccaacatttttctaaaagtctccacgaatttctccgcgtgaaccactctccattcctcgaaatcccattctccatacattctaggatcatctttattaacccaaacataagtttcaactttcaccttctcagaattatccattcttacaacttcaacagttactctctcataatcattaccttcaatcacatcgaaattattta

SEQ ID NO: 459 - DNA, 557 bp, Arabidopsis thaliana
ttttttttaggtaaagctttttattcttttctaaatagtgatcataaaatctcggattaattcaaaaagttggctataaggaaaaatccaaatattagtttcatctctaaacaaagtcaccatcgatttagtattctaaaacgccaacatatggagtttcaaaagcatatatttctctggaagatgatcatttcttcttctttggttcttcttctgcatagttcttgattagtgcttctacgtctttccagaataaaccctcaacaagaactccatctttcgtgaaccattgggtgacacttttggtgagctgaactgacttcccagctgagattgattttggatcagcactgtcgatggtgagagtgtactgatcagagaatctgggcaactttgaagataccaccaaaccagtgctggtgaatgatccctcaggaggataggtgaacaaaatcgcattcttctccttagtgtacagaatcagctgcaacaccgcattcaacactacatacaatgcgatgcatccaatcaaaaaatccctgttctcagggaatttc

SEQ ID NO: 460 - DNA, 557 bp, Arabidopsis thaliana
gcggccgcaaaaggttaatttaaaataatggaaaaaaacaaaaaatagtgaaagaaaaaagtaaaccattcggttcgattgttttgtactttagcttcggtttatcaaaataagagctgaatctcattcggttttcggtttggaatttttttttggtagcaatgaatacctgtcttaggagaagctaagaatgtgaggatgttgttgccagaaacattggtcgataatgtttgaatagtctacgcccacttctgcttccacttgctttcctgaaacttctccattctcctctgtaacaccttcctgcgtctttaggcggaaaacggaagaacccatgcggaagattacaggtaatgaattgtactcaattccaaattgctggctaagtaactcgtttttttctcgtgtctgggtaccctttaagtaatcctgggcttgaattttgctttttccagacttaacaagcatccagaaacatgtattatactgattgttgatatggcagtcgacttgtctccaagctagataatccaggagaatatctgatgttggatagc

SEQ ID NO: 461 - DNA, 557 bp, Arabidopsis thaliana
ccacgcgtccgtctttcttcttcctgattggaattttagggcttttgaaagcacgaacgcgtgaagctctaatcgagaaaaaaatggaggttttggataggagagacgatgagatcagggactcgggaaacatggacagcatcaagtcacactatgttaccgactctgtttccgaggaacgccgctctcgtgagctcaaggatggtctccatcctttacggtacaagttttcgatatggtacactcgtcgcacaccaggggttcggaaccagtcttatgaagataacatcaagaagatggtagaattcagcacggttgaaggattttgggcctgctactgtcaccttgctcgttcttctctcttgcctagtccaacagatcttcatttctttaaggatgggattcgtccattgtgggaggatggtgccaactgcaatggaggaaagtggatcatacgtttctcaaaagttgtatctgctcgcttctgggaggatctgcttcttgcgttggtaggcgaccagcttgatgatgctgataacatatgtggggcagtactg

SEQ ID NO: 462 - DNA, 557 bp, Arabidopsis thaliana
  misc_feature (1)...(557): n = A,T,C or G
aggcaaatttctgtacagtggagctcatctgggtcgttttttaattcgtgtcaagaccagctcgtgtgttgaacaggacatgtcgaatcactatctcttcttttgctcaagaggtgacaatacccagacttaacaagagtggtatctattgactcatccttcgcttgagctttctaccccattgttgttgcctaggtcctcggaagaagctttaactgcctctgcacacatgagagcagctgcagctttctggatcgctagatctgctttgtacctcaaactctctgctctttcccgcttgagcttcgccaaagcgcatgctcgccttgcagcaccagctgcatctcgcaatttgtactcatcaatgtctgtactattccgtattccttccacatcaggacgctgagatccgttggagtaacagacaagattggaactggggcattcagaatagcctgcatcccatcgttcnnncnnnttcctcttcccattgattctttgcgacttgttttggtgattcctatgatatccatttccaccgctcgagaaatatccca

SEQ ID NO: 463 - DNA, 557 bp, Arabidopsis thaliana
ttcagcatagtagtaggctagggatagaaaacttgaatagtacgatccagattcaggttccacttccgagttcttcatttgctgtatcagtagatgaatggcagaccatccaatcgggtggcaatgagattggaaaatggctattgaattctgatagttttgagttcggtgatcagattggaccaacttctctcaaaggaattttccgcggtaaaagagtgggaatcgagaaactaaaaggttgtgataaggggaattcctatgagtttgagctccgaaaagattacttggagctgatggcttgtggacacaagagcattctgcaattttacggtgtttgcatcgatgagaaccatggattatgcgttgtgacaaaactgatggaaggtgggtcactccatgaactgatgttgaagaataagaagcttcaaaccaagcagatactgcgaattgcaatagacatagccgaagggctgaagttcgtgaatgaccatggtgttgcttatcgggaccttaacacacaaagaatattactagataagcatggcaatgcatgt

SEQ ID NO: 464 - DNA, 556 bp, Arabidopsis thaliana
ccacgcgtccgatcgcgcctcataatgatcaagaaagtggtggaattcttctaatgttaggtaaagttcagtttgagcttaagaaactcgtcgacacttatcgttctcaaatattcaagaccattacacgaccttcagagtcacttctcagtgaccttagaactgttgaggatatgaagcaacaatgtgaagaaaagagagacgttgttaagcacatgctaatggagcatgtgaaagacaaggtacaagttaaaggcactaaaggggagagacttattcgccgtcagctagagactgctcgcgatgagctacaagatgaggcgactctgtgcattttccgattgaaatctctcaaggaagggcaagctcgaagtctcctcacacaagcagcccgccaccacactgctcagatgcatatgttctttgctggtctgaaatcgcttgaggcagtagagcaacacgtcagaattgctgcagatagacaacacatcgactgtgtgctctctgatcccgggaacgaaatggattgtagtgaggataatgatgatgatgaccg

SEQ ID NO: 465 - DNA, 556 bp, Arabidopsis thaliana
ccacgcgtccggttttatgttgcacaaaaaaattaaagatgtaatgattttttatacagtactatttcgtaattgatgtttgatttcgaagcaaaaaattcttggaaacttccttctcatcagaaagaagaagataaaaaggttggttgttgttgcatcgatctccaaatccagattgattcgtcacgaaatctgctcaccggttgtttcgtcgccgtcctctgttcacccaacgaagatgaacggcggtccctccggtttccataatgctccggtaacgaaagccttcgttattacgagcgctcttttcactgtcttcttcgggatccaaggtcgttcttctaagctcggtttgtcttaccaggacatttttgagaaatttcggatatggaagttaatcatgtccacttttgccttctcctccacaccagaattgatgttcggattgtatttgctatactacttccgagtttttgagagacagattggctcaaataagtactcggtttttatcttgttctcagggactgtatctctattactcgaggtcattttg

SEQ ID NO: 466 - DNA, 556 bp, Arabidopsis thaliana
ccacgcgtccgaatcggagaaaaagctacggagctcgagagaagagagaatctatgtcgaacccaaacgaaccagccagggctcttctgccttacctgcaacgtgccgatgagctgcagaagcatgaaccacttgttgcttattactgtcggctatatgcaatggaacgaggattgaagattccgcagagcgagagaactaagaccaccaattcgattctcatgtctctcattaatcaactcgaaaaggataaaaaatcattgactctgtccccagatgacaatatgcatgtggaggggtttgcacttagtgtctttgctaaggcagacaagcaggatcgtgcaggaagagcagacttgggcactgccaaaactttttatgctgcgagcatcttctttgaaattctgagccagtttggtcccgtacctcctgatatagagcagaaacacaagtatgctgcttggaaggctgctgacataaggaaagccattaaagaaggaaggaagcccactccaggtgatcctgtggatgatgatactgatttatccatcccatc

SEQ ID NO: 467 - DNA, 556 bp, Arabidopsis thaliana
ccacgcgtccgtcaaggttgtacaaatatgcctccatgggttttactgttcttggtgtgttcctaattacgaagcatgtcattgactctgttctagagagaagacggcggagacagttacaaaaaagagtgcttgacgcagcagcaaagagagctgagctagatagtgaaggttcaaacgggacacgtgagagcatttcagattctaccaagaaagaagacgctgttcctgatctctgtgtgatatgcctagagcaggagtacaacgctgtgtttgtcccgtgtggtcatatgtgctgctgcaccgcatgctcctcccacttgaccagctgtccactttgtcggagacgaatagatctggcggttaagacatatcgtcactgaacaacaactcaggcctcagaaacattctctacttgagtcttgtctgtaaataccgcaaaatcaaaacattacacagtttagcgttcgatattccctttggtttgatttcgacaacaaaacattttgaattatatagaaacataaggtgtttactcgatttgcaaaaaaaaaag

SEQ ID NO: 468 - DNA, 556 bp, Arabidopsis thaliana
ctttttttttttttttaattcatgagtgatattgatgtttgatttttacgcaaactgaatacaactgtttatttattatcacgagtttcccggaaatgcaaatttgcaccaagcatgtgtttctcaggaacaatttctacatgaacaaatgtttcttctgtcaatagaaggtaaaaacaaaaaaagctatccagtgtggaagagaatgacttttgttgaaacacgagagagtgcgacaactcaggactcggtggtgacttaagcagatgaagctttcttacaatgggcttcaagccagtccatggtaacactctttggcctctcaagtgcaagtccaagagctcggtcccatataagctgagagcagatgccaagactccttgaaacaccaaagagcacggtgtagtaccttgcttcggttagaccatagtggttcagcaagaccccactgtgagcatcaacatttggccacgggttcttcacctttccaagctcagtgagaacaggaggcacaacttcataaagctttgacaccagctggaaaagagggtcgtca

SEQ ID NO: 469 - DNA, 556 bp, Arabidopsis thaliana
aacttttcgaaattttgcttcatcgtcttcgtcatcgtctctctgttgaattcctcaaacaatgcctctttctctccgtctttctccttcgccgacggctttatctccgactaccggaggatttggtccatcgaggaaacagtgccggattccttactccggcgtcccgacgacgaagattggtttctgttctttggattctaggaaaagaggagattcctctgttgttaggtgtagcttagaaaccgttaatgtcagtgttggtcaggtgacggaggtcgataaggacacgttctggcccatcgttaaagccgccggtgaaaagcttgtcgtacttgacatgtacactcaatggtgtggtccatgtaaagtgattgcccctaaatacaaagctttatcagagaagtacgacgacgttgtgtttctaaagcttgactgcaatccagataaccggccattggcaaaagagctaggaataagagtggttccaactttcaagattttgaaggataacaaggttgtcaaggaagtgaccggtgcaaaatacgatgatctg

SEQ ID NO: 470 - DNA, 556 bp, Arabidopsis thaliana
ttttttttttttttttatcaaagccaattggattaaatattttatacgaaaaccctaatctacaatatttatatattcatatcattgttttttcttagtgagagtcatatgtctctcactatgtcactcttagacgtatgaccgtatacacacatacacacacaccacatcacacatgttattttctctctttttttataaggtcattcaaccctaagttcacgatcttaacgaacccggagctgattttctaccactccgatgatcccctcgaaccttcggggaaaccttcccgccctgagatttaggagacagtggccaatgaccagaagaaaccgccatgtccttataatgtatgagactctctagagcttccacaacggcaagcattttgggccggtctttagggtttgggctcacacattgtaaggctagaagagctgtatctttagccgccttgacggagtattgtccagcgagcctcgggtccataacacatcggagtcggcggctgcttgttagataaggctttgaccagtcgatgatgttctgctgg

SEQ ID NO: 471 - DNA, 556 bp, Arabidopsis thaliana
  misc_feature (1)...(556): n = A,T,C or G
acaatgtatggtgtgaaggaacagctgctggtgttgatgctgatcttagatacagttatctgatgaacactagcatcagtggacttgaaaacgccgatctcttccttctcatcggtacccagcctagggtggaagctgcaatggtgaatgctaggatctgcaagacagtccgtgcatcaaatgccaaggttggatatgttggtccacctgcagagttcaattacgactgcaaacacctcgggactgggcctgatactctcaaggaaattgctgagggacggcatccattctgtacggctctcaagaacgccaaaaaccctgcaatcattgttggtgctgggctcttcaacagaactgataaaaatgctatcctctcttctgtggagtccattgcacaagccaacaatgttgtccgaccagactggaacggtctcaactttctccttcagtatgctgcccaagcggctgctcttgatcttggtctcattcaacagtccnnnaaagccctcgagtctgcaaaattcgtctacttgatgggagcagacgatgtaaatgt

SEQ ID NO: 472 - DNA, 556 bp, Arabidopsis thaliana
gcccgggcaggttgattaggaagagtaatagagcaagagaagaatcagaaaaaatggatccggcgactaattcaccgattatgccgattgatttaccgattatgcacgacagtgatcgttacgacttcgttaaagatattggctctggtaatttcggcgttgctcgtctcatgaccgatagagtcaccaaggagcttgttgctgttaaatacatcgagagaggagaaaagattgatgaaaatgttcagagggagattatcaatcatagatcattgagacatcctaatattgtcaggtttaaagaggtgattttgacgccttcccatttggctattgttatggaatatgctgctggtggagaactttatgagcggatttgtaatgccggacggtttagtgaagatgaggctcggttcttctttcagcagcttatatctggagttagctattgtcatgcaatgcaaatatgccatcgggatctgaagctggaaaatacattgttggacggaagtccggcacctcgtttaaaaatatgtgattttggatattccaagtc

SEQ ID NO: 473 - DNA, 556 bp, Arabidopsis thaliana
ttattttttttttgttgcctcgaaaaaaaaaccatttcttagggaaaaacatgagaaattgcaagaaaaaaacattgattcgtcagacattgaaaaaaacacatctctctgaagtgattctcttttattttgacgatcatacgtagttaggttttgttgcttcttgtctcactgcagcttcatgcttctcatcctcttttcctcatcacgcagcctgcctctgttgctgtttcctgtagtagtcttgtagtcagggaatggcacgtgaccattctcgatgctttcgatgtcacgaactagaaggtcatactgtctcttagcttcttctggtgttttaccaccaacagctctagcaacattgtgccaacggtccggagtgtcttggtcatagactgctagagcacgctcaaaggctttgttctgcttaacagtccatgagccagagccataagaagacattgagcctgatgccattgtttagtaactaaagttgatgatgtttggttttgtgtagtaataaacctagaaaagaaagagattctgagcggacgcgtgg

SEQ ID NO: 474 - DNA, 556 bp, Arabidopsis thaliana
aagagacgaaaatggcactgagaaatgcaattcttcgtcacctgagggttccggtgcaaaccctaggattgaatcagtctaaaattgggttccttggtacgatccggtcattttcttcgcacgatgatcatcttagcagagaagctgtcgtcgatagagtactcgatgttgtcaagagcttccccaaagtcgatccctctaaggtgactcctgaggttcatttccaaaacgatttgggattagatagtttggacacagtggagatagtgatggctattgaagaggaattcaagctggaaattccagacaaagaagctgacaagatcgattcttgctctctcgccattgaatacgtttacaatcatccaatgtctagctaatcgctgtgtgctctctcatggtttctccttcctttttcttgtatgaggttcttctctctttgataatgccataatgggatttgcaaaaaaatcacttttatttggagagcattgttattgactcttttaacggttccagtttcttaaaaagaaaacctttttgcttgaaaaaaaaa

SEQ ID NO: 475 - DNA, 556 bp, Arabidopsis thaliana
atttggctgaactctggccaaatagattgatggattatcgtgggatcaaacatgcaattttccgggcaaaggagagacgaaaagcattgtatggaaaccttgcgaaagagatggatcaaacaaagatgaagaagagtatgaagcagttggtaccaagaacagactgtactgctcagcccaacaccgaattagtggttcagagacaacacagtggggaaaaaaaattgattgttgatccaaatgcaaccagcacttccgtggtcactagtcaaactatggttgacagatcaaatcagcagcagcctgagaagctaaagggaatctcaagctcttgcaatcctacagaggaaacaagagtggtcaagagaaagaacgaggctgtaatggctgagaaacaagtcgttcttgccctgaagaagcccgaacatccacagacacgtgtaatcccagctcctcagaatctgaacatcccacgaacaaccccggacctgaacttgccaagttgacatcacgattgacaaaggagctcttagaaacgccggagacaataacctct

SEQ ID NO: 476 - DNA, 556 bp, Arabidopsis thaliana
gtccggtctgaagaaagcagaatcaaatccatgtctttcagaggacttagcaggccaaatgcaatatctggaatgggtgttgcagatgagagcaaaaccacatttctagagcttcaaaggaaaaaaactcatcgctatgtggtcttcaagattgatgaatccaaaaaagaagttgttgttgagaaaactggaaatcctacagagagctacgatgatttcttagcttcacttcctgataatgactgcagatacgctgtttatgactttgatttcgttacttctgagaattgtcaaaagagcaaaatcttcttctttgcttggtctccttcgacctctggaattcgagccaaggtgctttactcgacttctaaagaccagttaagtagggagcttcaagggattcactatgagattcaagctactgatcctactgaggttgatcttgaagtgttacgcgaacgagcgaactgagagcaagcaagattgctatgtctattcaaaacttatggtaatgtaatgaataattcgtattctctgtggattgatttgtgtaaac

SEQ ID NO: 477 - DNA, 556 bp, Arabidopsis thaliana
  misc_feature (1)...(556): n = A,T,C or G
tttttttttaaaaaaaaatacactcaagtttcaagacaatgtgtgaaaaatagtaaagcagaatttacaaatttgtgcaaaacctatttgacatttttggctacaagtaaaatgaaagatctaaccttccacgaattcaaatgatttcaatcctttactcatacaatttacggacaccaaattcttcatttgatttacatcgtaccttgtaatggctccatgcttgtgacattagatcagaattcagacaggatcgtcatgctgttgttgtgtagatgtagtcgcatgagccacggcggatgatgatattcccggtgataccgtgaagtgaactgttctaggctgccctgactgaagcaccaacgcaaactgtgtagccaaagctgcagcttcctgtctctgtcttcggcgctgtagaatactgatggcccaagccatgatatagcatggaagaagaaatccagcagctcggagcaggacaagagatagtatcgannntgggtcgtcttcttcgccatcagtatcatctgttatggtcagtgcgtgtcgtaagaga

SEQ ID NO: 478 - DNA, 556 bp, Arabidopsis thaliana
gcggccgcagattgatgtacatcgatctacgtaaaagcggtacattcaaatcttacaaagaaacaaatttttacaagatagattatacattcagatcttcataggaaaaaaaaaggatcacattcttatttttaaaatcatacaaaacacttcacccattgggaagatataacacatatttcatccatttctccttcgaagttatgactgaatcacaactccttgacccatcatcatcggcatgttgtcaattgccttaagtggtggtatggtcaatgccacgttcttgccatcgtaggccgaaaggtgaactccgatagcggctcttcctgatggatccatattgttggaccagcttgcatcccactccactgcctttgcagtcgaacaagccacggtggcacctccaggaaccgttagtctcgcagagttctgcgggaagaacctttcaaagatcattctgtagtagtaagcttctttagtgtttggagtgttgtgagggaagatatgccccgcgttcgacatcatcttgtcattgacattttgagcagcgtga

SEQ ID NO: 479 - DNA, 555 bp, Arabidopsis thaliana
caagattataagcttctcagttcatgcatactcagatcggttagggttcgttgattctctttttgattacgaaagcttaagatctcttttggtggatttttgggtttatccatctatggtggatcgcagatcttttggctctataactcctcctctccaattagatatggaacagttgctgtcagaagcccaacacaggtggcttaggcctactgagatttgtgaaattcttcagaactatcacaagtttcatatagcatcagagtctcccacccgacccgccagtggttcactttttctttttgataggaaggtactgagatattttaggaaagacggacataactggaggaagaagaaagatggtaaaaccataagagaagctcatgagaagctcaaggtaggaagcatagatgtgctacattgttactatgcacatggggaagccaacgagaatttccagagacgttgctactggatgcttgaacaacatttgatgcatatcgtttttgtgcactacttggaggttaagggtaaccggaccagtataggaat

SEQ ID NO: 480 - DNA, 555 bp, Arabidopsis thaliana
ccacgcgtccgtatcataagctttttttcgtttatcaatcttctcgattcagccacaattcttgtttctcagataattcatctcctttctttgattcgtttccttctcttctgtcactcagatctagatctagatctaggtttttttctttctcatcggaaatttggcttagaggcttgttttgatctagggtttggtttttgggaattttgaaaaaaaaacaaaattaggaatgaatctatgagctactcaatcctgtttcgtcggattcgaattctacactctttctccgtcgtttacctctactacacctacgttttctcatgaagtaatcgttctcgatctcagttttcgtttttgatctaacttattctttgatagatttagaaatcggggattttcagattgtgtttttgagaggtttttataggaaaatatctctagaagaagaagaataatattatattgattttaattttggtgagaagaagtcaaaaagtcaacgagaaatggggtcgttgcaaatgcaaacaagtcctgaatccgataatgatc

SEQ ID NO: 481 - DNA, 555 bp, Arabidopsis thaliana
ccacgcgtccgcccatgtagtagccgtcacttctcgtcttcctcctagagattacccaactctctcgcttcttctttttcctcttagggtttcttcatcctttagggtttccacaaaaattcaaaacctacttggaaatatttgggcttgaagaaggaagaattagatggaaggaagaaggattacggcaagccctagaccttgtagtggaagaagaattgtggctaagaaaaggtctcgacccgatggattcgtcaacagtgttaaaaagcttcaacgaagagaaatctcttctcgtaaagatcgagctttctctattagcaccgcccaagagagatttcgtaacatgcgtctcgtggagcaatatgatactcacgatcctaaagggcactgtttagttgcattaccgtttttgatgaagagaactaaagttattgagattgttgctgcaagggacattgtttttgcgcttgcacattctggtgtttgcgcagcttttagtagagagtcgaacaaaagaatatgctttttaaatgttagtccagatgaagtcat

SEQ ID NO: 482 - DNA, 555 bp, Arabidopsis thaliana
  misc_feature (1)...(555): n = A,T,C or G
ctttttttttttttttttttttctgtgaactaaatgtatattttgtattttcttgtttcaatatcttcttttgcatttaaacatggcgattcttttttaatccaaagacaagaagacttggaaaaaaattgggatactaagcaacaaaggaagataaagatctttaaagaaaagtttcaggctttggattttaccgggactccagcttcaacccgcttgatctcaaagatgagcattctccacatcttcagcacaaacatctcagcttcttcgtctagaattgattgcaacagctcaagcatctgagacgcctgcacgtgttgttgagtgtttgacacgatgaaatctaccagagtggcttcctcttctccgagaaactccataattttctttgagatccatggtctcattctttcgtgcacttggtgcttgtcatacatagcccagtttatctcgtaagnnnataaatcttcctttgtctttgggattgtatctatcaattgtttcgcatccagaaacttagtatcaattatctttgcttttccagactctttg

SEQ ID NO: 483 - DNA, 555 bp, Arabidopsis thaliana
ttcaaatctccccaagcacaacaatggcgaaatcaatgagatgcaagagggtgaagagattgagagcaataagaagagaaatagtggagaaggaatcattcactctaacgagagaagacgccaaatccgccgctattgaagccgcactcgctgctccgaagttaccagttcgtcaagccccagtttctccgtttatggaagttgcgacgccttcctctgagtctgcatctgcctccactacaatcgccaacgatagtgatgaggaaatggatgatgagaagaaaaacaagtcgctaaaacctattgggaagaagttgaagaagaagtttaagctggggatgaagaatcgtcgtagtaagggtgtccttcgaggcaaacgaaactaaaactggtcttggctttcttctactgggtttgttttctacttgcataatttatgttctctcttaattttggggttcttcaatgtcttagaatatagcatcttttgtactgtgttttttccatgagtttcagtactatagaaaccctaaaaacgtgatcgcgtctgaaaaa

SEQ ID NO: 484 - DNA, 555 bp, Arabidopsis thaliana
tttttttaatgtatagggaagctttttgtaaacacaaatatgtttggtaaccattttggtattttgaatcaacgcatatggttgtttttttcgattattttaaacttgatttcttagaacatacaaacacacacatcagaaggttaaagatctctgtacaagtacaagatctctcataccaagagagaacataggtcaaaggcattattgtttttcactactgcttgccttatgaccggattctgtatactgtgagtgataaactcatggcttgcttgtctcaggtttcttgttggcacttcctttctcaccatctagcttatcttgctcgagtttcttcttcttctccagtctttccctctccattttctggatatacatgctctctttcgcgcgttcctcttcgctgagcacacgacctttatcgtcactgaagtaccgaatcgccggtcctcgagtcgataccaccgaacgcgatgcaccaatctgactctccccaaaggatcgagccagctttagctttgtgatcgcagaacgagccgacgacatcttggc

SEQ ID NO: 485 - DNA, 555 bp, Arabidopsis thaliana
gaagaaaaatcgagaaccatcttctcagccgattttagtaaccatcttcttgtttgctccgaacaatcaagagatcgaaaatggctgatgttcacaaaggaaaggtttgtgtaaccggtgccggagggtttttgggttcgtgggtcgtcgatcttcttctctctaaggattacttcgtccatggcactgtcagagaccctgataatgaaaagtatgctcatttgaagaagctcgagaaagctggtgacaaactcaagctcttcaaggctgatttgttggactacggctctcttcaatctgctattgcaggttgcagcggagtcttccatgtcgcttgcccggttccaccagcttcagtccctaatcctgaggtagaattgatcgcacctgctgtggatggcacgctgaatgtgcttaaggcatgcattgaagcgaatgttaagcgtgttgtgtatgtttcctctgtagctgcggctttcatgaaccctatgtggtcaaagaatcaagtattagatgaggcatgttggtctgaccaggaatactgcaagaaaactg

SEQ ID NO: 486 - DNA, 555 bp, Arabidopsis thaliana
caaccataagaaaacgaaatctttccaaaaaataaaagacagtagtaacataaaactggattggctaaaaccaagaaaattgaggtccaacatactaaaaacaaagcaacacttataatccacgacaaaaaggtaagatcttaaccgacaaaatctactcttcatcgaacaaaccgaaatcacctccatagtcttcttcgtcggactcttccttctcctctaccttagcagcagctggggcaccaccacctgcatcagcagacaccgcagctactgaagcaacagcaaacttgcttggatccttcaagtattccttgaccttctctgcttgagggaaggtgtactcagtggcaacagcaatagccaaggcattcttgtacgcattgatgaacatatgcggtgcagcagcaagggtagggtacgacacagcaagagccaaggaagtgaccatggagataccagaagcaaacttctccacaagttggtcttcagtaagatcaagaacctctgggctgaagactgagccattgtcatagacagactggacaacaagac

SEQ ID NO: 487 - DNA, 555 bp, Arabidopsis thaliana
tctctctttttttttgttattatatcgaaaacttaccaattctgaagaggaagacccactagaagatttgcaagaagagtggtgagtgtgtgttttctttctttcttatatacatcatttggctgagttgggagttgggacaatgtttcgtggtgtaaaacctatctatctatacactaacctatcatattctctggcaagaaaaagtaatcaaaagaatttaagttttgacttctatgcaaggtgcaatttccttctcgtttcgtctcctgtacgttgattgttcttaacagacttgccatgtcttgagtctatagattctggtctcgtggttcgtccatgtactctctccataaactcttgtatgtgattatatgtactaagccgatgtctgttacaggcagcaaaaaatgctacaaaaccgttcaatatgctcctgacagcacgaaaaacatgagaaaagagatcgttccaaagtgtacgccacatggagacttcataagtcttcacagctgcttgagaatctgatgcaagctgaagtatactgctcatata

SEQ ID NO: 488 - DNA, 554 bp, Arabidopsis thaliana
  misc_feature (1)...(554): n = A,T,C or G
tttttttttgaagctaaaccagtaactgcatgatagatacttggcaacagacaaaaaacctgtatcattaatttaggagattatagttttacaacaaaattccgggttccattaactaaataaggaaaataactgtaaaactcaggcagacatcagctctggcattcccattccaccagctaaatctgcatcgagttgcgagtgtggcgctggtccctctatcttcttcacacgctttttgtgtttcttagtcttgaaatgataatccatcactgatgcattggagaagttccgatggcagagtaagcagttgaattgacccattccaggtaaatcctccgtctctggtttacgcaactctgtgaataccaaattagacatcagctttgggccattgtccggcatccccattcccccggctaaatctgcatcgagttgcgagtgtggcgcttgtcccatcatcatattcacacgcttnnngtgtttcttagtcttgaaatgatcatccctcactgatgcgttggagaagtatcgatcgcagtgtaagcagtaga

SEQ ID NO: 489 - DNA, 554 bp, Arabidopsis thaliana
atacgaatgttctacacttgatacaatgaatccaaaccaaactacataagtagcaaatatgttcaccctacccttgaaacaacactattctgcaggtcataaatcagttggggaatcttgtagctcttctcacccacgggaccatcgaacgctgctgctgatgcgatccagctccattgttgcctacattgcttctattgtctgcaaaccttctcattctcattctctcttccttcatgtttgcaaaccgagaatccagtgtctgaggccattgcctttgccctcctcctcctccatttgcctgctgctgcactatcttctccctttgctgctgctgctgctttgcgacaaaccctctttgtgaagctctattctgagctggtggagcaataaaccttgattgattcgtattagtcatccttccaccattataaggtctaccacgcggagtagcagaagcggctttacgagcaacggttgttgttacaggaaactggtttccttggaaattagacctcttcttagcaaaagcaccctgtctaacatcagaccga

SEQ ID NO: 490 - DNA, 554 bp, Arabidopsis thaliana
tttttttttttgccagagaataacatatcatgtatccatatagatatggttatttcttatccaactagtaatgtacaagaaattattttcatatgacaaatttcccactgtacgaaatcaaatatagcaaacaagaatcatcatttcttaaaagaaaaatctcttaagcttttgctagtccttataggaggaagttccacagatgcaagaacaggttctgagctttcatgcgcaagagaatgatgtgtggaagtttcagcttcttggtgttgagactcaggatcccaaaattggtgttcatgatgaccatgaccagagtatctaggagaaggagaacttgggtaattttcaacgctccggttattgaaattgtgaaggagatggattggagatgagccatgtgttggtgtggttggacggctagagaaaggtgtgttggatcccgagtgtcttccgtgtttcgtctcgttctttgcagtgtgatgccacttctttaatgccgtggctactctatcgttgaatactgttggcttcattttactacccatctgagt

SEQ ID NO: 491 - DNA, 554 bp, Arabidopsis thaliana
  misc_feature (1)...(554): n = A,T,C or G
gcccaaaccgaagccacctcaatcgagagattagtgccaagagacctctacaacaaaattttcatccacaaggacaataccgcttgtcccgcaaatggtttctacacttacgaatcatttgtccaagcgacgaggcggtttccgagattcgggagcgtaggaagccccgtgacacaacgactcgaagtggctgcatttttggctcagatttcacacgagacgaccggaggatgggcaacggcaccagacggaccgtacgcttggggattatgctttaaagaagaagtgagtccacaaagcacttattgtgattcttctgatacacagtggccttgtttccctaacaagacttatcaaggaagaggtccaattcaactatcnnggaactacaattacggaccggccggtcgagcctnnnnattcgacggtctaaggaatccagaaacggtgtcaaataattcagtgatagcttttcaaacagcactttggttttggatgacgccacagagtcccaaaccttcgtgccatgacgtcatgatcggaaaataccgacc

SEQ ID NO: 492 - DNA, 554 bp, Arabidopsis thaliana
ctattatggtaactataaccatgaagctgatgatttacattctgttgtccaatacttctctaacaagaaccgtgtggttcctataatcctcggtcacagtaagggaggtgatgttgtcctcctctacgcctccaagtatcatgatgtccgcaatgtaatcaatctctcgggacgttatgatcttaaaaagggtataagagagcgtcttggagaagattttttggaaagaattaagcaacaaggattcatcgatgttggagatggaaaatcggggtatcgtgttactgagaagagcttaatggacaggttaagcactgatattcatgaagcttgcctcaagattgacaaagagtgcagggtcttgacggttcatggatcggaggacgaggtaatacctgtggaagatgcgaaggagtttgcgaagatcataccaaaccacaagctggagattgtggaaggagctaatcatggttatactgagcaccaaagtcaattagtttcaacagttatggagttcataaagacagtcattgtgaagaacaactagaattgag

SEQ ID NO: 493 - DNA, 554 bp, Arabidopsis thaliana
ttttttttttggcaaagatcatcttatcatataaagaaaaaaatgagtacactcttaagttcttccctaaagggggattgagaacgaagtaaaaatgaatacaatgtgatgcaaaatcgtattccttgttgtgttcatctcaatatcctttgccgattctctcttgattccattgctacttcacttaggcaggaaaggttataactttgctgatgctagctcacttccatcaactcttttaatctcatcaagacactctcttctagggacgttatttgctctttgacaactgaaagaatgatcgcctcatctgacttcgcctgcgatgaagcttgctttttttcactcacttctactttttcttgaagcctggattcacctccaagatatgaacgttcatccgtttctaagtttagacgttgacggtctgcaaatttctctagcaagcggccgattaggttatgtgcaaccaagcttgtctcatcagaaatttcttggattgctaggtactggtttttatttcttcttcgtggcttctgctcaccatgatcatc

SEQ ID NO: 494 - DNA, 554 bp, Arabidopsis thaliana
gcggccgcgggagacgaagcaaagatcttcactctttcagaagtttcagagcataatcaagctcatgactgttggattgtcatcaatggaaaggtgtacaatgtgaccaagtttcttgaagaccatccaggtggggacgatgttctcttgtcttcaacaggtaaggatgcaacggatgattttgaggacgtgggtcacagcgagagtgcaagagaaatgatggagcagtactacgtaggagagattgatccaacaacaataccaaagaaagtcaaatacacacctcctaaacagcctcactacaatcaagacaagacctctgaattcataatcaagctcctccagttcctcgtaccccttgccattcttggtttagcagtcggaatccgtatctacaccaaatcagggtaggcttcttttttttctgagcattacttccttatatcttatatatagagagaaagattcaagtcttttgaaaagacaaatctgaaagtctctccctttgttattgtctcttcccatattttgctgtttgaatgtattttggataa

SEQ ID NO: 495 - DNA, 554 bp, Arabidopsis thaliana
gctacacgagagcctgtttggcttaaagccatggaagcatcaccacctcctgtgtttcctcgctccaatggaaaaatccagaagattgttctccctgaggatccttacgttcgtaaattcgctaataagcatcctggaaccaaaattgatgaccctgccaagatatcagcatttattccagatcaagcacgtgtgtatggttgccgggtacttgaattgaaggagcatggcatcagtgagggtgacgccatgtctgtagctaatatggaatatctttcagagagaaaggaaatgaagaaagcatacaaacgcttaaaggagcttgcggtaatgcaagataaggatccacctcctaaaccgtatcctagtgccaagaaagggttaataactcaatcgaagacatccgctaaggatcgcttccagactcctagcgtccgcaggctagttaaccagttgaaaaatgagaaagatgtgttgctgcaagacagaaccggaggaagtgctaatcaggataattggatcgacgaataaattactcaaaatcatcgttttct

SEQ ID NO: 496 - DNA, 554 bp, Arabidopsis thaliana
tgaatacattgaagagtaacaacattagtgtagatagattactaacagacaaaaaaagagagatagagatgaagaaaggagatagacctcattatttgtttcttaaacactaagcttctcaatctctctccttagagcattagccctaaccaaacttccaatggtgttcacagccaacttgatatcctccaaaggactacccggcgcaacccgcttgtacagatagctatcgaatgtcatcttctgaacatactcatcattacacatctccacaaacgcttctctagccggatttgatctgtaaaacactttctgcaacacatcaagtaccctgtaggtaggcaagtatgtcttatcccatttctccaagtacttcctcaagtccccttcgtcaatcatcttcttaccattctgtgaaccttcgacaatggcttcagcacacattcttccactcttagcagcaaagtagatcccttcaccagagcatttagtcacataccctgcagcatcacctacaagagccacacgtttcgagagcctacgtggtctcggat

SEQ ID NO: 497 - DNA, 554 bp, Arabidopsis thaliana
gaacaaagagcataaagatgtggtagttaaggaagatgacgaaaacaaactttcaaaagaagaggataaagaggttggaagtaacgaaactaaaacctatgtcaaccatgaaaataccgtggaggaccacaaagaagatgatgttacccttaatgatgagaaggcccgcaaatcagaatcagtcttcaccctatcaaaaactactaccacgctggtgacaacgtaaagatgcttgcttgaagtcatacataatgatggtaattctggtacgtgccacatctctggaaacgttgatgtttctttttatgtatatatataaattgacatagtttgcagaaaaagtgattctgggtttgacttggttggtgctgaggagagaggagtaggtaaaggttgtatagaaaattgaagaggcatgattttggtggttgcatttgttttaaccaatcatctaagcataggattcattagtactggttgttttaggttttatttatgcaatgtttattaggagaaaaggatatccatttgtattttgccttattgtcacaaaa

SEQ ID NO: 498 - DNA, 554 bp, Arabidopsis thaliana
  misc_feature (1)...(554): n = A,T,C or G
aatgtaagaagataatgaaggtttcgtacaacaaaagcttgataatgaactcgggatcttccccaatggtcgctctaccaatgaaaatgtatctaaccgagatnnnncacgaaggaggatcgaatattgtacaggattannncaaacatgtaatcaacaagaatcattaatgaaaacagataaacgaaaaaactttttggtagcacattgcttgagaaaaggtgtcaatagtcttcaccttcatcttcttcatcgtctccaccttcagcaccaacttcttcgtagtctttctccagtgcggccaagtcttcacgtgcctcagagaattcaccttcctccattccnncaccaacgtaccagtgcacgaatgccctcttcgcatacatgagatcaaacttgtggtcgatccgtgagaacacctctgcaactgctgtgttgttactgatcatgcatacagctctctgaaccttagcgaggtcaccacctggaacaactgttggaggttggtagttgattccacatttgaacccggttgggcaccagtcaacaaactg

SEQ ID NO: 499 - DNA, 553 bp, Arabidopsis thaliana
  misc_feature (1)...(553): n = A,T,C or G
aatgttaagaactatagtatttatttagcattttaaatctacactctagatgactgattttaaatctttcactgtgatgtataaattcaaaaaaaaaaaaaaggaaaagtgtctcttttttttttttgtcaagaaaagaaggaaaagtgtctaatttgaaagagattagaatgaaataaagcaaatcaggtgcttaaacgtgttcttgtgggaaatttgagacgccaaagcataatcttggaacaatcttgtgccggaagtcccttcaactttgtatcgtcctccaaaactacttgcttcacatattttatcgaatcctgtttggtgccttcaacagaagaaggacgaccccatctctcagggtcccaaagtatggaactattgaaagcgnnnnntgatatatgaatcggaggctttgtctctgtctcgttattaatttttctcaaatgccaccccaatacttgtgaagattcacaaacaggcccttctactaccactcgtttcctattagccgataacaatgccattggccaagtaccaaatacctcgatat

SEQ ID NO: 500 - DNA, 553 bp, Arabidopsis thaliana
  misc_feature (1)...(553): n = A,T,C or G
tcgagcggccgcccgggcaggtaccgggttatacatgctgcccgggcaaatgctactcataaccatggactagatcctgaccgtctccttgttgcggaagcgtttgttgggaagggactctttgggaagaaggtagcttaccatgcaaaaggaagaagcgggataatatcaatacccaggtgtcgtctaacagtcatagtcagagagacgactgcagaggaagaagctgagattgcaaggctgaaagttcacaattttaagaagctaaacaagcggcagagacagctggtaccacacaagttgatcgagacaagtccaatctggaaccgcagaggtaccaaaggcaatcacaggtcatctgagttggtaccgtctcactaagtatcattgttccggcaactgtaacgagagcttcnnttttatggtacttgtttgtatcggtaattggttactattccattcaatagatatgttgccagagnnaggaaccaaaagaaaagtcatttttcaatttatatgaatcgaagaaaactgtaatcttgtaaacataatt

SEQ ID NO: 501 - DNA, 553 bp, Arabidopsis thaliana
gtctgaagtctccactctcccctctgttccagtggtaccagggtttcctgttattgggaacttgctgcaactaaaagagaagaaacctcacaagactttcactagatggtcagagatttatggtcctatttactctataaagatgggttcttcttctcttattgtcctcaattctactgagactgccaaagaggccatggtgacgcggttttcgtctatctcaacgaggaagttgtcaaatgcgttgacagtccttacttgtgacaaatctatggttgctactagtgattatgatgatttccacaagttggtgaaacggtgtctcttgaacggtcttttgggtgctaatgcacagaaacgaaaaagacattacagagatgcactcattgaaaatgtgtcttccaagttgcatgcccatgctagggaccatccacaagaacctgtaaacttcagagctatatttgagcatgagcttttcggtgtagcattgaagcaagcttttgggaaagatgtggaatccatttatgttaaagaactcggtgtgactttgtcg

SEQ ID NO: 502 - DNA, 553 bp, Arabidopsis thaliana
aaggggatggatgtgaagagaaaaactttgatggtaggcagtgtaagccttcctcatctaatcgtacgaagtccaggagggccaagcagttgttacaatttgataaaagctgcagaccaggcttttatggtatctggcccagccaaagtcaagttgtaaagccacgtcgtcctctgcaaaaggatccagaattggattatgaagttgatagtgatgaagaatgggaagaggaagaagctggtgaaagcctttcagattgtgagaaagatgaagacgaaagtttggaagaaggatgttcaaaggctgatgatgaagatgatagtgaagatgactttatggtgcctgatggatatctctcagaagatgagggggtccaagtggacagaatggacattgatccgtctgaacaggatgcaaatacgccatcatctaagcaagatcaagaaagtccagagttttgcgcattactccaacaacaaaaacatctgcaaaatttaactgaccatgctctgaagaaaactcagccactgatcatatgtaacctaacgcatga

SEQ ID NO: 503 - DNA, 553 bp, Arabidopsis thaliana
gtctcttctcccaccgccgatctcatcccgcagcttgctgctacactcgtcgctgctcttggcgctcaatgctaccgcctcacactaccgccgtctcctccgcccagaatcctgacgccgcaagtgccaccttcgtctgctaccatggcttcctccttcaatcctacccgaatccttgaccatcgcgcgagctctcaccggaatcgtcgtggggcttttccggctagcaaacgtcgccgtctggtcgatgagcccatcgattacccggatctctccaacccggcttaccaggttctctccactccgcttttcgcctctggaattgggtcgattcgcgagcttctgtcgtcctctcctccgccgacgacgtcttctcagcctccgtctgtctcgattccaccaccgtccgctccaccgctcgttctcagcgattctaaggatgccgaacccgctggtctcaccaatccgtctgctcctccgtccccgttggctcccaaaaacatcactccggttgcttcaccggtcgcagacgtcccgatgcctgatcctctga

SEQ ID NO: 504 - DNA, 553 bp, Arabidopsis thaliana
attcgcggccgctgaaatgagtataaattttacaacttcttcacaaatgtatagtaacatcgagaagctaattcttcaagcttcacttaaatatgtagctaatgcgcacaaatgtatttgtgggcgctagtaagtagtaacctcacgtcctcttattcctgctcccaaacagcaaggcgaagtaaaataagatcctaaagaagagacctgaagcaaacgtaatccacaagcaatcccacttgctcaattgcgtaataccctgttgtgcaagtaagtcagaccccgtcctcaagcatgtggactccgttatcttcgttctcagagatttactgagagtttcaaggagcttaaccttcccggagtcagacactcccccgagaagagtactgtcgaaaacctggacacccctaacaaaacaacgagacgggtcatcaaactcgttgattaagacagcctcatacggatacttgagaattgaaatgtaatgaaaccacgtccaataaaacggtattcgatctcggttgacgtagaatccactcaacagtaaacagta

SEQ ID NO: 505 - DNA, 553 bp, Arabidopsis thaliana
ttttcacttccacacaaaaacgttggatccatcggatttacgacagcttatgttacctgcgtctaaggtttggttaaaaactcatttccatcttaaatttcgattcccttttgctgcttataaaaatattcagagattcacttatattatcaagggtggattacttcaatctctacatcttatttcatgattacgatggttttcttatgaatctatcaatcatttgagattagtagattgatttgttctgtaatccattattatcattatcagtgagaaaaaaagaagaattcgtaatcggttgtagttccggcaacgtattctgattcactggatttggaatctctgcatgcggtgaaggatgtgaaataaacacgtatcctcaacttatccccatcgatgagacacgttcttgagtttatcctttcttgggcctcttgtttgggcttcgttgaaagttgtctttgatgtttatgtaattgggtgtgatgttatgtattattatttcaataaaactgcagtttcagaggaaaaaaaaaaaaaaaaaaaaaaa

SEQ ID NO: 506 - DNA, 553 bp, Arabidopsis thaliana
  misc_feature (1)...(553): n = A,T,C or G
aacaagaaacctaccgttatggtattaatgtacaaaacaagacattaaattaagccataacaaattgaaacagtagtagtccatatgacatcacatgaccacacaagccgccgggttctcgtcgctaaatgcagtggtgtagcggacctcggtggagctagcacgagccagctgcgacactccggggtcgtcgactcttcggacataaccgganngtgccttcttgtcgtagacaccggcagcgtaaggatgagcgaccacgtcgtagggcacatatggccagagctcgactttcttgccggtcctgtgagacattcgagccaccaccttgttgggatcgacgtagccgactacagtgactttatgggctttgggctccaacgtcacagaagacacacccttcatgccttcgacagaacgccgcactttccgctcgcaaccttcgcagtccattttcactttaatctccaccgtctgcaactgtttgcgctttttaatcttgtgaccatgagagcagtcaaacatttcagagacatgatcaagaacacccatt

SEQ ID NO: 507 - DNA, 553 bp, Arabidopsis thaliana
cttttttttttttttttttttttttttttaagttaatcaagtaaatatatcaaaagctggattattttacagtgaccaagaaaataatcaaagattgcacaattacaacaatcaaaagccctctacatatataatctttctactctctgtgaacggagaatgagatcggttagcgaacaacacaatcccatctcaagagacgatcatatatcctccataccggatttgggtggcaacatgcggaacaagcttgtatccttgtatggacgaagaattggcccgactaaagatcttagctaccagcttcaactgcttgtatatgtttggtctgttttattaacctaaaagatcgtctagaagcggtcgtgcagcgtccatccgcgttgctgtctcactgtaccgacctactagttgactgttggagttccactgctgatgattccccattttcctcaatcagtaaatcctttctggtgatcaagcctatcacacgggaaggacggggaacaacgaatagatgtcgcaacccaagttgccggaaaagattgtatac

SEQ ID NO: 508 - DNA, 553 bp, Arabidopsis thaliana
cggccgcacaataaaaagacttcaagagatctttggaagaaggaaaaaaatacatccataaaaagaaccgataccagcctccgactacaactccacaccatcatattctacttataaaagagcttttcatattctactatataatacctgtaacctttttatgttttactttataatatctattaattattattagatagataataagggtgatggaagatgctaattatctaagtggccaacaaaatacttcaaaaattgcatttttaatatcttatcttaaacccatcatcccattttgctctccagtctccaccaatcgacccccatcctgctcggcttgcagcaaaagggttgttggttattttgtttgtttaagagttcccagcgctggacaatgaaggatttgatgcagacttggcgtcctttgcatctgatccttccccaacaactgcttcttcctcgctcctacagcttaaagtccccgggttcatcttcctcacttcctctttcgtgtatatgaagattttgcgaaccatgcaacaaaactcct

SEQ ID NO: 509 - DNA, 553 bp, Arabidopsis thaliana
  misc_feature (1)...(553): n = A,T,C or G
ccacgcgtccgaatgtgaggaaagctattaggatcgatgagcatgtacctgacagccttaccacttcaatggtggacgatgtgttctacgtgttgcagagttgtctgaggagagcgatttcaacttcaaacataagttctgtgattgctgtgttgagctatgctggtagcttgttgggcaatgattaccatgaagctctacaacagaagattagagagcctaaccttggtgctaggttgttcttgggtggtataggtgtggaaaacaccggaactgagattgcaactgctttgaacaatatggacgtgagctgcgagtacattctcaaactaaaacatgaaatcgaggagcaatgtactgaggtatttcctgcaccagcagatcgagagaggataaaatcatgtctatccgagctaggcgagttaagcagcacgttcaagcagttactcaactcanncatggaacagctagtagcaaccgtaacaccaagaatccgtccggttctagacaccgtggctaccataagctacgagttaacagaaaccgagtacgc

SEQ ID NO: 510 - DNA, 552 bp, Arabidopsis thaliana
  misc_feature (1)...(552): n = A,T,C or G
cgtttgaatcttccaaactacaaaaccgactctggttctctagagagaccgcaccggatacttttcagaaaacataagnnnaacaaaaaaagttttgatacgagttttattgcatacttcaatagtttcttaagaacataacaagttatcaaactattttcattgctagatgttcgatcaaaccgcggtgactgcgattttcatatcgctttcgcaatggtttggaaaattgcagatgaaaaagttttgtcctttagacaaagttatacgatctttgcctgaagtgtaaggttttgcccctgtcggtgttttgcagttgttgtaacttccgctatctaccttcactacgttgtgcatcctcggattatagttaaacacaagaacgtcgccggctctaaagtgtttgcctttaggccaacccacagcgttaaaggtccagataccagagtcaccgaccgtgtacgttgcagcttgaacgtagtcagcttgaagcaacaacactgacacagccatgagagtcactatggctcgagccgaccatgatgcactgcc

SEQ ID NO: 511 - DNA, 552 bp, Arabidopsis thaliana
ttttttttttttttaaaccaactttaatccattttaacttttatatattaaaaaagggccttgaaaggctttgaaaccaatcataaacccattatcactagtactcaaccacaaccactaacttttgtttctcctttcctttttttcttctttcacattttctctttctttctctcacaaccaccaccaccacttctcaatgtcgtcttccaccaccacaacaaccaccgtccacggcgagcctgaacgacgaacttactggtgtcatgaatgcgatatgagtttatccctcctctcctcctccgattccgattccgattcctctcctctgttatgtccccaatgccgtgtcgatttcctcgaacgtatggatcacgattcttcttcttctaatctctttgacgttaccatcggtgattttgaagaacaagacggagaaaacgatgatgaagacgacgaagaagattggtgtttcgttgatccagctgttaattccgatgataatttcctcctcgatagtccttaccttcaccgtcttcttcgtcatctcgc

SEQ ID NO: 512 - DNA, 552 bp, Arabidopsis thaliana
gtccgcgcctcatcctcctcgtctcttctcgttagctctctcaatgaggagcccgatttagggtttcctccattggttatatcaattcgatcatctccacaaagctctctaagactctttcggtgatctcatcttcttcttcttgtttagcctccttgaggttactttgtttgttactagttccaaaacatgccgaaagagaggaaagaacggtccgtatctcttgataagtataaacgatcgccactgtgttgtgaggcaagccttgctttgaagccgagtgagaaacaagttaaagaatgggaagaggctcgttgtcctgtttgtatggaacatcctcacaatgggattcttctcatttgttcttcttatgaaaatggttgtcgaccttacatgtgcgacactagccatcggcattctaactgtttcgatcagttccgcaaagcttctaaagagaaaccttctttgtctttacttcgtgaggaagaggaaagtaatgaaccaactgagatggaagatgtggattcagactcaactgctgtaaatctatta

SEQ ID NO: 513 - DNA, 552 bp, Arabidopsis thaliana
  misc_feature (1)...(552): n = A,T,C or G
gcggccgccttttgtttcctcttaccagaaaaaataaataaacagcaattttttcatttttcgactcaaatcatgcaaaccatttcgcctgcgttctcgtgcgatctcaaatccgtaattcaaccgaatctaacggctaagaaagcgcgttactctcacgtaaatggaaagcgcgtgtctgttcgttgcagttacaggtctgagtcgtttagcttccctaacggtgttggctcaagccgagccgattggcaaagctcatgcgccatcttagccagtaaagtagtttcggctgagaattcaagctccgtcgccgtcgttaacggacacagtaacggctccgttgatttaagccttgttccgtcaaagtcgcagcacaacggaaagcctggattgattcagccgttaacgataacagatctatctcccgcgccgtctcatggatctactcttcgtgtcgcgtatcaaggagttccgggagcgtactccgaagcggnngccggaaaagcttacccaaactccgaagctattccttgtgatcaattcgacgttgcg

SEQ ID NO: 514 - DNA, 552 bp, Arabidopsis thaliana
tcagatcaattaaaatttcaaaatatctcttcgaggtacaacaattcgtttaaaataccactatagtatttggatactgatgatttggtgttacaacataaatgataaaacccaatgaatcaagaacgtatagtttcaactctctaaaccctttgtggagagtcttgtggagtcagagtatctatcttctttttcttgtagagtggaactcttcctccaagctctcttagctgatccacaagtccgtatagaaactcaaacgtcaatatgttttgagcattaagttgctctctaacttgtggatgaattctaaaccattctcccaacatcttatgaacgtgagatcgaatcatcctccatggaaccggatgcttctcacacagctttaaatactcaacaactaaatctccctggtctaaccctccatcgacgaatccctcttcttcgttatcttttgcccattcagctgttctaaacccagcaaaggccgccgggttttcaagaagcgtctccgcagagagaacaccttcaacacccgtctctttgatgcag

SEQ ID NO: 515 - DNA, 552 bp, Arabidopsis thaliana
  misc_feature (1)...(552): n = A,T,C or G
tccaccttcgttcttctgattccatatagatccgtttaatagcagcaacgttgttcaattgagaaggtggaaacatgtttaagttcttaaaaggagtagtggctggatctgggacgggactcaaggatctaccttataacatcggtgatccttatccttctgcttggggttcatggagtcactttcgtggtacctccaaggatgatggatctccagtttcaatatttgctctctctgngaacaatgctcaagatgggcatttggctgctggacgaaatggtgtcaagcgccttcgtaccgtgaggcatccaaatattctttcatttctccacagtactgaggtcgaaactcatgatggctctactaccaaagttacaatctatatagtcactgagcctgttatgccgctgtcagataagataaaggagctaggcttgaaagctacccagagggatgagtactttgcactggggctacaccagatanntaaagctgtgagctttctgaacaatgactgcaaacttgtgcatggtaatgtctgtctggcaagtg

SEQ ID NO: 516 - DNA, 552 bp, Arabidopsis thaliana
ccacgcgtccgagttactacagaagcgaaatgttgccattgttgaaacgtcacaaggtgttaaagttcacgcttacggactcacggcttgctaacaatggcctgccaccatctatccaacgactgagatgtcgtgctaattaccaggcactgctatacacaaaggagattgaggacctagggaagattttggttaaccggttaagaaacaacactgagccgtatatcgctctgcatttgagatatgagaaggacatgcttgcctttacaggatgcaaccacaatcttacaactgaggaagcagaagagctgagaatcatgaggtacagtgtcaaacattggaaggagaaagagattgatagccgagagagacggattcaaggcggatgtccaatgtctccgcgagaagcagctatatttctaaaagccatgggatatccgtcctccacgactgtatatatagttgctggtgaaatctatggaagcgagagtatggatgctttccgtgcagagtacccaaatgtcttctctcattcaacccttgcgactgaag

SEQ ID NO: 517 - DNA, 552 bp, Arabidopsis thaliana
taacttttcttttccaacttgcaaaagcttaagcatattaatattctttttttcttcctcaaataaaaatatagaatcagattctaatgcttaaggaatgttttaaatctccgacatgaagaagatgctttcccaaaccaatcttcctcttcccaatctcatcaaccacactcagatctttacatatctctaccttaaacctaaccaccgcttcttccctcttccccaatcgaatcttctcgaatcctaccaaatgcttcctcggcgatccgtgaatcgccggcggcgtcgtgaatagaaacaccgtgtgaatcccttctctatctcctccgtttcgtaccttgatatgaacttcaaacgccgatccaccgccggagacagcgttttcgcagtgcggtccgatcgcgtctagcgattgacattccgatgatcggcaaacgtgattctcttcgagaccgagagaaacgagacttggagctttgactaaagtgtgactgaatttggtgtagctgagtccatctccgaatgcgtatactgtttctccggtgtaga

SEQ ID NO: 518 - DNA, 552 bp, Arabidopsis thaliana
cttttttttttttttttcttacaaggatctttattagagcgtaaacggtatttgaaatgccaaaaatccttcaaactttgtattgagatgcactagaaatgcaatcctttagcaaacacaaatgagaaataaaaggggagagacccgtaaacatcacaaaataactgtagagatcacattcacaaagacataattactgtacttcacaagaaagaaacaagggaacacacactcttgtgtctttctaatactcatcgccttcttcgtcgtcgtcctccgctccttctccaccaacttcctcataatctttctcgagggcagcaagatcctcacgagcctcagagaactctccttcttccataccctctcctacataccaatggacaaaggctcttttggagtacatgagatcaaacttatggtctatacgtgagaacacttcagcaactgcagtattattgctgatcatgcaaaccgctcgttgaaccttagccaggtcaccacctggaacaacggaaggcggctggtagtttatcccgcacttgaatccag

SEQ ID NO: 519 - DNA, 552 bp, Arabidopsis thaliana
agacaacccgataacttgcagaagacagatgatccagacattatgatatatggcagagagagctgttgagtcgtttgcaatttgaggctcaagagattgtcaaagtaaggaattctagagcagcatccgtatcatcacagtcatggactggtgaatatcaacgtgatcaagccgtggttggatttgttgggtacccaaatgttggaaagagttctacaatcaatgcattggtgggtcagaagcgaacaggtgtcacctctaccccaggaaaaacaaagcatttccagactttgatcatctctgatgagcttatgctatgcgattgccctggtttagtcttcccttcgttctcaagctcaagatatgaaatgattgcttctggtgtacttccgattgaccggatgacggagcaccgtgaagctattcaggtggtggctgacaaggtccctcgccgtgtaattgagagtgtgtacaacatttctcttcctaaacccaaaacctatgagcgtcagtcccgcccgcctcatgctgcagagctcttaaaaagttact

SEQ ID NO: 520 - DNA, 552 bp, Arabidopsis thaliana
  misc_feature (1)...(552): n = A,T,C or G
tcactttctctagtttcctgtaacccaacccactcaaacgaaattttttcttaatctctctttcgttcttcttcttcttcttcttctttagattgttgtaattccaatcggaactctcgattcgctttcttctccgttcttctgtggcggaccggttttgtggttttttatttgaacattcccgatcttgccctgagttccacgatcagtttctttaaaccctaggttttacacaagcattctgtttctccagattatcgcagactctttcgttctattctttgtagttttgtaaaaggtatttcggtagatttagggtttgtctgtgtctagttttcgagatcgagagagatttgtgatgaatactaacagaggaagatatccaccgggtgttggaacgggtcgtggtgcgcctccgaatccagattatcatcagtcttatcggcagcaacaaccacctcaagatcagcagtatgttcaacgcggttattctcagnnccctcagcagatgcaactccagcaacaacatcaacaacaacagcagcagcaaca

SEQ ID NO: 521 - DNA, 551 bp, Arabidopsis thaliana
cggccgcgctgaaaaagcctctctgcagctccattcttcttcctggatttcaaattatacgctctaggtcagaggcgattttttcgtttcctgattctaacgggagtcaaagatggattctctgttgcagcgttaccggaacgatcgccgcaagctcatggagtttcttatgtcttcgggtttggtaaaagagcttcgttccccttctggttcccctacttctctttctccggctgatttggatgctctcagtgccgattatgttttagattgcgtgaaatccggtggtgtagttgatgtatccaagggcagagagaaatacaattttgattcatcataccctgtaacaatacactctgagtctggagattcctattttcttgtgtcgagtccggatttagcaggttctcctcctcatcgtatgcctcctcctccagttaacattgaaaaatccagtaacaatggtgcagacatgtcgcgtcacatggattcttctaatactccttcagctagagacaactatgtatttaaagaggaaacacctgacatca

SEQ ID NO: 522 - DNA, 551 bp, Arabidopsis thaliana
  misc_feature (1)...(551): n = A,T,C or G
caacggtattccattacgtactggtttgtctggaacagcgttttctggtcagaatctaaatgggattcagactcagttgggtcctgatggtctgagtcttgnntttggaacaatcacggtgattgacgacataatcacatccggtcctgacttggggtcacaaccacttggtaaggctcaaggtgtttatgttgccagctcagcagatggaagcacgcagatgatggctttcacagctatgcttgaaggtggagagtacaatgataatctaaatttctatggaatctataggataggaagcgccatgtcacatctgtcagtgactggaggaaccggaaggtttaagannncttgcggatttgcagaggttaggccgttgattnntgcgggccaacactttgttgatggagctgagatgctgttgaggatcattgtccatctgaaatactgagaattatgtttaaaacttgtgaatgaaatgtgtgtgaaatgtgtgatgccatttgtaattaagaatgtttccttcttgtgaattattccaacaactattc

SEQ ID NO: 523 - DNA, 551 bp, Arabidopsis thaliana
tgaacgagatgagtttacgaaaggatgctggatgctcttggatcgaactaaacaggaaggtatttagctttgttgtcggtgaaagattcttagatggttttgaggaaatcaaaagtctttggagtatattggagatgaagatatcgaagatgggatacagaccagacacaatgtcagtacaacatgatctaagtgaagaggagaagattgaacagttaaggggacacagcgagaagcttgcccttacctacgggttgattaaaacttcagaaggaacaactattagagtttacaagaacctaaggatctgtgtggactgtcacaatgcagcaaagttgatctccaaggtcatggaaagggaaatagttgtgagggacaacaaaaggtttcatcatttcaagaatggggtttgttcttgtggagattactggtaagtaggactgtaataaaattggtgaaaacagatgcattagtaatagtagctcttagtaaattcagtattgtgtgtatttatgttcaggcgagacaaacatcaatgttaatatgttata

SEQ ID NO: 524 - DNA, 551 bp, Arabidopsis thaliana
  misc_feature (1)...(551): n = A,T,C or G
gtagccgtcaacgcatctttcatttcgggaatggcgaacaagattgcaatgtttctctcggaagcaatgaacaacaatgctgtgataaacacgtgtctaggagtatcgtttgtggttttgggattgagatctgataaacagcagaagtatgttgaggccttagcagagcagaaggagtcactcttcaagtctaataaggcaatgaaactcaccatgtgggagtggaaacagcagctctttgctgaagctgcctctgcgggtaatgccgcggttgttcctttgtcgacgcttaaggccatctatggtgaagttaccaccacaaccaatcaatctggtgacacnnccaaggaagattctaaagtgtccactcccaagatcatgatatgagaggttgttaaatttttggtaggttcatttcacttcaaattattcactcggctaaagtaaagattagcatttagtctcatcatttgcataaattgcacttgtaaactagtttggcatctattgtctgttgttgtgatctttttttttgtacctcggccgcgacc

SEQ ID NO: 525 - DNA, 551 bp, Arabidopsis thaliana
tcgagcggccgcccgggcaggtcaaatgggttctttaatgtcaggatgggactctcgagtaagggatcccaaatcagtgagaaggtgcaagtcgctcacaagagaagaaatcgacactttttggaaaacgaagaagaagaatgaagaagaagaacatgttcaagccttttccaagttggaaggtgcacaaagccaagcgaaagagaagaagagtgtagatgatctttttgagaaccaaagcaagagtagtggatggtggagaaaaacctactgggcgttcttgaatgagccgagggaggaagagggtcgaccgaacaactacgtgtcgcaattcaaagttgctcacatcgccaaaattgcgggctcgtaatgacgctataatcaccggctaatcacatatatatctcgtgtgaaatgcgattagtcgtctgccgttgtggtttaatcaccggctaatcacatatatagtatgttggccgtgttagtatgtgaatgtgtgagtagagcatgtaacaaagggtgtacgattttaatgtaagaatgtgttttac

SEQ ID NO: 526 - DNA, 551 bp, Arabidopsis thaliana
caagaatacacagctctcaagtattgtgtttttttgatacagaattcaacatcaatacatttgacatcatactcttgaagaagagggtaatgagaaggaaaaattagcaacaaaaaaaagaatgcccagttgctgcgtggtatatgatgatgcagtgatgggtaatcagtctggggaatacatactctatcgacaactctctgcttccaacttgggcaccatttttggctttcgaatgaatgccacatgcttcatctttcgcgctagagacgaacaacacactctcaaaaacattatctcaggttttttcaaaagagttcctctgagttgaatttgttccatgcttccttgagcatgtcgaaaactttctcggcaatgtatttctgctggagattggctcctttttgctgaactttgtcaggatgtatacagagagtggccttcctgtaaactttcttgacagatgcaccggtaattaaatcggtcaacgatacaggctgccaaccgcattctggccaaagaacatattgtaatgttgaaagcagagcacg

SEQ ID NO: 527 - DNA, 551 bp, Arabidopsis thaliana
  misc_feature (1)...(551): n = A,T,C or G
tttccaaagaagtagaggcagagttagtctcacgagatatcggctgtcacttggttcaagttcttgaagctgtaaatacagttctcttcgatctgagaggcttcaagaggacatctattactttagacccggagaattcctaccttcactctgtacttaactgtagatgcagcactgcgtttctgattagtgtaatatacattgaagtttgtaagcgcctgaatgtaccaattgttggatctccagttggggaagattttctgatttggcctaaaacggagtatcctgaggaactctttaaagcaacttcaggacagagcttgttctctattgtcaatggaaggtgtgttgatgatcctggatcaatggcatcagacttaactgcaaaatcacttcaagacctcgacatggcaacaaacagagacattatagggattgctctagccaatttgattaggcttcactggagacgtgcttctaagtcatcnnatggacttatgctgacttctcctcttagtcaacttaacaacatcagtagttctaatttccca

SEQ ID NO: 528 - DNA, 551 bp, Arabidopsis thaliana
ccgggcaggtacttgctctttgagagatgtgcctcgtagacatcaagaacacccgcaagcttctcttcactctccttgatcagcttctcatcagatgggaatcccatgactgatgcgaacattatgtgaagcgttaagttcaatagcggtgggtggtaagtggtcgcttccacatcaagccattgttcaacttgacctctgtcttcaacggttttccccaaaagatcaggtccttgtgacctgtacctcggccgcgaccggcgcgagcggccgcccgggcaggtacccgggaggcgcatttgaccctcttggatactcgaaggaccccaagaagctcgaggaattgaaagttaaagagatcaagaacgggcggcttgcgctgttggcgtttgtaggattctgtgtgcaacagtcggcttacccggggacaggaccattggagaacttggcaactcacttggcggatccatggcacaacaacattggcgatattgttatccctttcaactaatgaatgtaaaaatagaaatatgtgtacctcggccgcgacc

SEQ ID NO: 529 - DNA, 551 bp, Arabidopsis thaliana
taatacaattacctcacggactaatcactatgtatctttatatatacaagtttgcaacaagcaattgagatttaagtataagacgagtgagtataatcaaagaatctttatatacaatcctccaatggtgaaactatgcgatcgatgttttgtctgtaactcgtatagtggaagaatctggtttggtccgaaccgatgggtttccggtatcatcaagaactacaaaagccgtatcaccaggcttgaagctcccggcaagaaaggcttcactgagtggatcttcaacaatctctgtgacagttctccggagtggtcgtgcaccgtaagctggatcatagccttgtttgcatatgagctccttgacgggttcagacacctctaaaccaactccgagtgccacgagcctcgacttcaagtcttgtagcatcaggttcaagatctccatcatctgagccttctctagctgtcggaaaatgacgatttcgtctattcggttcaacaactctggacggaaatagttcttgagttcttcgactaccaaagctttcatt

SEQ ID NO: 530 - DNA, 551 bp, Arabidopsis thaliana
  misc_feature (1)...(551): n = A,T,C or G
tttttttttgatagtggcacttaatttcactagcagagcacaacagattctttactttttctctacaggctttggtcatgaatctaaatttaatttcaaaagcttaatgtacaagcaaaacttaagacggtaaactaaaaactctttctatgcttgtccctaatgtagataacaactcatgttgtgaagcaaagggttcctgaagataaataatgtctacccaaaatcatagttttcctgatcaagaattattaccagcagagttgtttttgggaccttgaagctccattggagaattagtgatgctaccaacagaacccattgtctgnnngctaagctgtggactcgctggacaaccctcgaggttgcttgtgctcatgggatgcattgcacccgagcttatcngaggactcataggagttctttggttcacttgctggggactcattggagnnntctgactcatttgctggggactggactgttgtagctgctgttnggtaattccagctgatggtgaccctacttggggtggtgatagtacagactga

SEQ ID NO: 531 - DNA, 551 bp, Arabidopsis thaliana
  misc_feature (1)...(551): n = A,T,C or G
ttttttttcgaataaaaaaattggaatataagaagaagaaacaaattgtctggtgacaataaatattccataataagaaaacgaaaaaaaaaacagacctaaagaagtaaagatttttgaatcaatctgtaatgtcgaaaatcatctcaattctaagaaatctccaaattttaagtgttcttctgttggtgtttgtagtggagagtatcaatgtgcggcttcactttttttcctatttctacgacttttaacctgtttgaattctttctcgccatcttctgcggnnnatttgtcttgctgtcatctgcagagccattctcagtcttgctgctatctgcagagccattctgcgtcttgttgcttccacctttggttttaccagaaggtttgcttccatcataatcaacttctttttcctttacacgaagcttacggtctgcaagcatgaagggcgtgttcttggcagcctgaagcacgctctggactgaggcaacagtttcaaaggagataaacccgaagcaaactggattagcattacccctggagcttcg

SEQ ID NO: 532 - DNA, 550 bp, Arabidopsis thaliana
gcggagattcggggctgggaacagatccgtttccaagctcgtactcaccatttgtgtagctatcctgttcataccatctctatcgtatggagcttcacaagggaaccggaagacggcgaagtcttctgtgttttccttgttcaatcttagggataaaagcagattttggagcgagtctgtttttcgtactgattttgatgatttggagtcttccgttcactcgaattctggtgtgctgaattacactaagtcaggaaatattgcgagttacttagagcttatggaagtcgattctgtctatcttccagtgccagttaattttatcttcatagggtttgaaggaaaagggaaccaagacttcaaactccgtcccgaggaacttgagcgttggtttaataaacttgatcacatgtttgaacatacacgagttccacaaatcaaagaagttctcaatcccttttacaagattaacattgaaaaggaggtgcagcaccatcttcctatcatcagtcgcgtgaactacaacttttctgttcatgctatacaaatg

SEQ ID NO: 533 - DNA, 550 bp, Arabidopsis thaliana
  misc_feature (1)...(550): n = A,T,C or G
ccacgcgtccgaagtataccatctctgaagctgatggtcacaaggaatgggttagttgtgttaggtttagtcctaatactcttgtgccaactattgtatctgcttcttgggataaaactgtgaaggtctggaatcttcagaattgtaagcttaggaacactcttgctggtcactctggttacttgaacactgtggctgtgtcacctgatggttcgttgtgtgccagtggtggcaaagatggtgtgatcttgctttgggatttggctgaagggaagaagttgtattctcttgaagctggctctattattcattcactttgcttcagtcccaataggtactggttgtgtgcagcaacagagaatagcattaggatttgggatctcgagagtaagtctgttgttgaggatttgaaggttgatcttaaggctgaggctgaaaagactgatggttctactggaatcggaaacaagnccannnngatctactgcacaagcttgaactggagtgcagatggaaacactttgttcagtggatacactgatggagttat

SEQ ID NO: 534 - DNA, 550 bp, Arabidopsis thaliana
gaaatatacaatttatctgacagtgtgtttaacaaactgcttgatagagaaatcgaaaccaacgacgaagttgagaaagaagaggaggaggaaggagtgattgaatatgttgaaggcgatgatgaactcgaagcagaggaagaagaagacatggaagacttctctggtcttccatctaaggagtcttaccttgaaggtgatgatcatgactcagatgacgaggatgacgatgatgctgaagaacaagttgtgattcataaaaagggaagagctttaaagaagtctgatgataatggaaaagcaaagaagaaaccaagagtagttgttgaggttgagcaagaagatgcagacacaagaagatccctgaaaagccttaaaatttgagaaagattgtgaaagtttttgatacttaatgatgaaaaaggtaaaaacttcttcagttgagaggcctttggttttgtagaatttctacctttatcttgtaaaagcttaatatgttcttacattttaaattataaaccattttatattcaagttacaaaaaaaaaaa

SEQ ID NO: 535 - DNA, 550 bp, Arabidopsis thaliana
acaaatgcttgcatttaagaaaaaaagattacaaatggacaagaaacaagaaattaatgatttcggtgattattaaactatagtattacaaacaaatttatcaacattaacttatagcgaccgacaaaagaaacttaacttttagcgatgctccagagtttttgaccgggtttgttgacaagtgtgtgagtgcttaaggttgggagctaagtagtctttcggcctcgtcgtttgcttcagcctgtattttccatttctcttcaaggttttcaagttccatgatctgctctatctgttgagcaatgttttcagtattgttcactgcctcggctgcaagaacatcactgtccatttccacctcaatctcaatcattgaagatattctagcataactatcgatcagatcaatctttccctttatggagttctctagactttctcgtaccttctttactcttgttcttcgagtacggtaagctggctctcccactgctaaaattttgttctcgagctggcacattcgagccaacatccacacctctttctcaac

SEQ ID NO: 536 - DNA, 550 bp, Arabidopsis thaliana
ccacgcgtccgttaaattaaccgaagcaatagatagaaccaaaaaaaatactatcattagagaccgttggtttcttcttccctctttcttagcctctcgtttctcatctccgagaaccaccaccgatgctcctccgtcttcttcgccggtgattttgtcttccgattgttatcaatgagtcttcgtgtagtttcctccgttttctccggaatcaatcgaatccctaacctccacgagactcatactcttcttcgctctcatgtcttctctttcttcttcaaaccggcgaatatcggtagtatacggcgactggtcttatccccatcatatggagaccggagcagagatagtgttggctccgccgccgatgtttcgtcatctattctcgacgacgagcttctgagcagcgtatccgccgttagagatgccgatgaagcgctcgcgatgatttctgatcggttcgggtcaaatcgcggtggaatcgttgaacttgaagattgccgttcgattatctccgctgctgtcagtcgcggcaatgtggaccttgcgt

SEQ ID NO: 537 - DNA, 550 bp, Arabidopsis thaliana
ttttttttttttttttgaataatagcaaaagatgaaataaatcacgaggaatggtggtttcttatagcaaaagtgagagacagagagatcatttttctccttttttcttattttcctttccctttaaagatcaaagaagaaatgtgttgatgttgacgattttatttcgatctgtaacaagctctctttgatgcacgaacgatgtcctctatctgaggaagagccaatctctctaggttagctgcatacggcattggaacatcagctcctgcaatcctctcgaccggtgcatccaagtacgaaaagctctcttctacaaccgacgcacaaatttctgcacagactccatgttgtgggaaaccttcttcaactgttaccaatctactcgttttcctcactgaagcattgatggtggctcggtcaagcggacggattgatcgaagatttattacctcagcacttattccctcttctgcgagcttctcagctgccttgagggcgaaaccgaccatcttcgagaaagttactatcgttacgtcctttccttctc

SEQ ID NO: 538 - DNA, 550 bp, Arabidopsis thaliana
tttttttggccattgacattgtcatttcttacaaaacacgaatatgtttacacagggtgttacaatacgaagaagccaatggtagcgaaagatggaaatattgtacgatacaagagacataaaaacacatgagatgatgatcacctcagtggaacttgaggctggtcaagacgttgttgttgacgggatcagccaagtgatcaagcaggttctggtaaggtcccacaccggtcactagtccttggataaagtaaccgaggatggcgagcatagccagtctaccgttcttgacctccttgagtttcaactccttcagtgacttctcatctttcccaaacccaagagggttgaagaaaggtccaccggggtaagccgggttacctgaaccggccaaacccttctctaaccccaagaagtactgttttcccatagatcctgggttgtaccagtcctgtaacctccggtgctcagcgaatcccatcagagccatctcgagaacaaagagtgtgtaattgtctgcccagtaagtgtatgtccctgctggtggaat

SEQ ID NO: 539 - DNA, 550 bp, Arabidopsis thaliana
gcggccgcatttgatctatgcatagtaattctttgaaatataaagtttacatatgactatcctgtcgtgcaacctagttctctctactaaaatctcatttcttccaaactagtatcacaacaaacaaaataaaatatttgatgtcaagaggttcagacttcagagacataactaaactactcaaaatccaagaatcttgggagcaatgtgaagcaaaggctccaaagcactcggagcaaacttcctcgcaaagagataacacatggaagtgttgcgaccattgtaactgcagtttcttccatcaaagatttttccaaagaagttttctgtaatgtccgatcgcccaaacgtagctgggtggggaccgcccctcgaccagtccacccatgtcaagctccggttagccaagactgttggtttctcaatcgtcaacattgttgggaagtaatgctcgtccacatagcaagcaggcctgcagaactctttgaatttcgggtaatacaatgtgtctttgacaatggtagctgccaggtcccggttaacctcaaac

SEQ ID NO: 540 - DNA, 550 bp, Arabidopsis thaliana
  misc_feature (1)...(550): n = A,T,C or G
gcggccgcgtgaatctacctgcatcaaagcgtggtaaccctcgtcaatggcgtctcctcgacatcgtaaccgctgctttcttcggtatcgtacttctcttcttcatccttttattcactcctcttggtgattccatggcggcttctggtcggcaaacgctgcttctctctacggcgtcagatccgaggcaacggcagcgattagtgactttggttgaagctggtcagcatttgcaaccgatcgagtattgtcctgcggaagctgttgctcatatgccttgtgaggatccgagaaggaatagtcagcttagtagagagatgaatttctatagngagagacattgtcctttgcctgaggagactccgctctgtttgattcctccgccttctggttataaaattcctgttccgtggcctgagagtcttcacaagatttggcatgcaaacatgccatataacaaaattgctgaccggaaaggtcatcaaggatggatgaaaagggaaggggaatactttactttcccaggcggtggcacgatgtttcctggcgg

SEQ ID NO: 541 - DNA, 550 bp, Arabidopsis thaliana
  misc_feature (1)...(550): n = A,T,C or G
cggccgcgcctggacaagtactattgcagtcagattctagacaaatttctccatttagtagagagagaactaaacatgtaaaaaacttaaaaataaaaaagaaccaaacttgttgctaagagatccaaactaaaagcttaagaagaagacgatagatagctcagtcttcgtagtcgccttgggcatacttgtcttcggggtaatacacagccactacttggtttcctccaaattttcttccattcatccccgatctggcctttgatgagccatccacatccgcatactctaagaaaaccttcccaactcctggtgttgggtcatgatctggattaggcctcggaatcacaacattcactaagttaccgaattttccaccttcttgtcgcatgtcctccattatctctgcatattcttcatcgtctctaagatcatcagctgtaaccacttgagtcaaacagacaatcttggtgggagtacctcctnnntggaacataagcctctgcaaagcaatctgttgttgggcataaagtaagacttcttcttgctc

SEQ ID NO: 542 - DNA, 550 bp, Arabidopsis thaliana
  misc_feature (1)...(550): n = A,T,C or G
ccacgcgtccgcgaagagcttcagaagaaagctaggcccgtgaaaggtcgtgatgacatcagagctgtggcttctatctctgctggaaatgatgaccttatagggtcaatgattgctgatgccatcgacaaagttggacctgatggtgttttgtccattgaatcttcatcttcttttgagaccacggtcgaagttgaagaagggatggagattgacagaggttacatctcgcctcagtnngttacaaaccctgagaaactactagctgagtttgagaatgctagggtattgatcactgatcagaagatcactgcgatcaaagacatcatccctattttggagaagaccactcagcttcgtgctccgttgttgattattgcagaggatgttactggtgaagccttagctacccttgtcgtgaacaagcttcgtggtgtcctcaatgttgttgccgttaaagcgccaggatttggagaaagaagaaaagccatgcttcaagatattgcaatcttgacaggagctgagtacctagccatggacatgagcttac

SEQ ID NO: 543 - DNA, 549 bp, Arabidopsis thaliana
tagtaaagaaactcgaactctctgtatttgtttgcatttgttacctacattgttccatgccaatcttaggaggagtgagtgaggttggacaaggcacaggtgtccaaagcattgaactccttcactgccgtagcaaccacaaggcctaatttcacagcatcatcctcactctgtgcctcgatgttaaggggaagaacaggatcatggagagaaagtctgagaagaaaccatccaccaaagcccgaaacgcggatcccttcgtagttaactggagctattataagatttggatttgtttctattgagttcgacacgtgttgcaggaccttctctccatactcccggaaatcacttccttcaaggtcagggtgattcttgtcgattttaagcctcagttctaaagccactctgggctcttccagaccttcaacaagatctgttaaaactttgctgccactcccttgaccagcagctcgggccgcagctagtttgttcaggatttttaccatgagataggccccatcgtcgagccaatggttttcctttaga

SEQ ID NO: 544 - DNA, 549 bp, Arabidopsis thaliana
ttgtttcaatacaattttacaaaagtaacaaattatatgaatcactcaatctgaccgtaccaaaccccttggatcttcacatcttttggtaccttagcacccaagtcagtatccgatggctgaagactctcgaacactccgatcacttcacctgtctccggtttgctctttgtgatcttcaaagtgatctctccgacggaagccgccgtgttcttgacgttttccttggatagctcttcctcgtctcctctgcctccggcaggcaaagccactgcattatcgtacccagtggatccaccacgaccctttgggtccaaaaaggacgagccacggtacgatggaactaagaacttgccactgaagctttcgggtttccctgaagcctcgagctgcttaaccgtgaagaggaacggcacgcgttctcctcccggaagctggactgtgactgctgcgtaatcgataccatcttcttccttgaacttcacgcttccgtctgaaccaacctgatcaaatgacaacaattcaattgacttgttatcagtttcttgc

SEQ ID NO: 545 - DNA, 549 bp, Arabidopsis thaliana
cgcccgggcaggtacattagtttggtatgatctttgttctacagcaaatacattacatgtttgaaggaatatcctaaagaatgaaaaaatctaaagggaaaaaaatgaatctgttcttattgtgtgttcagttgctttgatggacttaaaaatcgacaagaaagattatatatctgcacactttgtaggtgcatacccgagcctagacctctttgtatcatagagtatatgaaaattctgctgctggtagtttccaatgattgaaaatgctgatttgggagttcctagcattgccaagcaaaccaaatcctcattcaaccatatgaaagaattctctgtcgggaagttccaaaccgcgccatctgcaaaagcaatcccaagctctggcagctgaacgttatgaatgccagagacgttgaagcaaggatctaggattggaaaatctctatagaccggatacttccctttagctttctcagcaatcttgttcttgatgaattcatatgcaggttctgcgaagtaacttaaggttgtacctcggccgcgacc

SEQ ID NO: 546 - DNA, 549 bp, Arabidopsis thaliana
ccacgcgtccgtcaatcttgagattgtgtcaagaaacctcaagagtgaaaatgagttttttcagatcaaagacttcaaaaactgaaacacaacaaccatcatcgtatggacaacaacaagacgctatgtactcatcttacggaaccgtgagtgacgaagtgttattacagattcatggatgcagagctcatctcatcaacggatccgaagctgtggagctagccgccggagacttcgagcttgtacaagtcttagacaacaacgtagccttagctatggtcgtgaggatcggaaatgacttacaatggccggtgattaaagacgagccagtggtgaaacttgactctcgtgactacctcttcacgttgccggttaaagatggagagccacttagttacggcatcacgtttttccctattgatgaaaacgacatcgtttttgtgaatagtatcgagttgctagacgatttcttgagagagaattcttgtttctcttcgtctccgtcttcttcttcgtcttcttcttcgagtgttaacaatggaattgatt

SEQ ID NO: 547 - DNA, 549 bp, Arabidopsis thaliana
ccacgcgtccgggaagctccttcaccttcaagcgatccatacaagttcctcaacattacacttaactcagatggatctctcaccagacaccgtgatttccccaaactgcccccaacagagcaatccaaagacataccattaaaccaaaccaacaataccttcatccgaatcttcaagccacggaatattccgccggaatccaaacttccgatcctcgtttactttcacggcggtggatttatcctctacagcgccgcttcagctcctttccatgaatcttgcaccaaaatggctgatcgtcttcaaactataatcctctccgtcgaataccgtctagctcccgaacaccgtctcccggcggcgtacgaagacgccgtcgaagctatcttatggctccgtgatcaagctcgtgggccaatcaacggtggtgattgcgacacgtggttaaaagacggtgtcgatttctcgaaatgctacgtcatgggttcaagctctggaggaaatattgtctacaacgtggcgttgcgtgtagttgacacagatctttct

SEQ ID NO: 548 - DNA, 549 bp, Arabidopsis thaliana
  misc_feature (1)...(549): n = A,T,C or G
aatctgatgtagagcttgaaggagacactgttgagcctgataatgatcctcctcagaagatgggggattcatcagtggaggtgactgatgagaatcgtgaagctgctcaagaagctaagggcaaagccatggaggccctttctgaaggaaactttgatgaagcaattgagcatttaactcgggcaataacgttgaacccgacttcagctattatgtatggaaacagagctagtgtctacattaagttgaagaagccaaacgctgctattcgagatgcaaacgcagcattggagattaaccctgattctgccaagggatacaagtcacgaggtatggctcgtgccatgcttggagaatgggcagaggctgcaaaagaccttcaccttgcatctacgatagactatgatgaggaaattagtgctgttctcaaaaaggttgaacctaatgcacataagcttgaggagcaccgtngaaagtatgacagattacgtaaggaaagagaggacaaaaaggctgaacgggatagattacgtcgccgtgctgaagcac

SEQ ID NO: 549 - DNA, 549 bp, Arabidopsis thaliana
ccacgcgtccgtccttatgaggggaaagtggttgcactacatgggattccggtgaatgctataacagatgacatagataggttcttatctggctgtctctattatcctggatccatccagttcctcacagttcaaggacttggaacttcaaagagggtagcattggtgcgtttcacatcacaaacccaggcaatgaacgcatacattacaaagaacaggaacttccttctcaaccaacgaatcacattgcaagttctgcagtaatttcttagtttctattccattctcgtggtgtattccaatggtaagagatccaaagcactttcttttgtctctactgttgggatgttttaggtcgatttggttatcaaaaatttccatctgcaaacttcacgatgcttgataaactgttgttgtctctctcttccctggttcagttcgaagttgatgaataacaaatacatgtgtcttagtagaagcagaaagtctcacataagcagatgttatactatgtgatctttttctctttcttgtattttgactaaagct

SEQ ID NO: 550 - DNA, 549 bp, Arabidopsis thaliana
cttttttttttttttttttttttattaaaactgaagttgcttttttaatataatcataatgtgcaaacaaacatcataaattgaagatagaaatgagactcaacttaggatgtgacaactaattagcagccacaaggcccatatgaagaagaaagaaacaaaggcgtgatcactcttcttttcccatagccatcaagaactctccttcacataccacagagttccctacatatgctttcccttccattttcgctatcccaaaccgcttctgcaacttcacaagtgtcatcctcatcaccagcgtatcacctgcaatcactggcttcctgaatctgactttgtcgattccagcaaagaagaagttgcttctagatccgccaacttctggttgtagcatcactatacctcccacttgagccattgcctcaaccatgagaactccaggcattataggtctctcagggaaatgcccaggaaagaaattgtcattaatggtaacgtttttaatagctaccgcagatacaccagctgtgtactctatcactctat

SEQ ID NO: 551 - DNA, 549 bp, Arabidopsis thaliana
  misc_feature (1)...(549): n = A,T,C or G
ttgcatctttacaacaagggattgtataacttatttatgacacttcattattgaggagacttgtttaatcataaacaaactaaacaagacctaaattaatgtgttgtagtgttggagattactcttctttcttctggatagtctcttactcaacaagagggtttgactttctcaaactttctgaatgactttgactttgactttgaccatgaccatgaaccattgtttcctccatgtgtggtattctctcgtgaacaaagaatctcataaatagaagatgaaacttgaattcggggagaccaaaactatcacgagttgtgacgctgctgcagcaagtaattcttcagctttatgaccaaagcgaagaccgcaaagcatggtatatgcatcacagccactcccaagtaccataagggtgcgtatggtgacgaaagatcaagaaattggtatggccaccataagttcttgacggcatgnnntatccattggtaagccacgaaaatacagctccaaagtacaaagtaagcaatccggaacagtgggaatcgc

SEQ ID NO: 552 - DNA, 549 bp, Arabidopsis thaliana
gaactctccgaccagtgtttccatttccaaggttccaacttgggagaagaagcagatctcaaatcggaactctttcaagctgaattgcgtgatggagaaaagtgtcgatggtcaaactcattctaccgttaacaataccactgatagcttaaatactatgaatatcaaagaagaagctagcgtctctacattattggtgaacttggataataaatttgatccctttgatgcaatgagcactccgctttaccaaactgctacttttaagcagccttctgctattgaaaatggaccttatgattatacaagaagtggcaatcctacacgggatgcattggaaagcctccttgcgaagcttgacaaggcagatagagcattttgctttactagcggaatggctgctcttagtgctgttacacatcttatcaaaaatggcgaagaaattgttgctggagatgatgtatatggtggctctgacagattactatcccaagttgttccaagatctggcgttgtggtaaaacgagtaaacacaactaagttagacga

SEQ ID NO: 553 - DNA, 549 bp, Arabidopsis thaliana
ttttttttgtagtgagaatcgtttattcgttatccttgacaacggtgacagggcaaggcgcgtgttggatcacaaagctgctcacgcttcccattattatcctttgaagagcactgagtcctctgcttcccatgacaatagaatcgagtttaagatctttaacagcatcaacaagcttctctcttgcatctccccagtataacttggtcactacatgcacctctttctgcctcgaaccagtgtcgagcatatcaagacatgcgatgtcggttttgacaccgtatttctccataatctccggttccctaaactctgccaacggtatgagaggagaaccggatttgaaccagagggagttacgagattcatcgccagagagtggtagagtgtggatgatgtaaatcgtgtctcctttgtctgctaagttctcgatcgcccatttcagagcgttcttgctgctctctgagaaatccatggcgattccgatattcctgtctttaggcatctttcttgaccctttttttcttctcaagaaactttgagatggtt

SEQ ID NO: 554 - DNA, 549 bp, Arabidopsis thaliana
tcaaaacctttgtccgtgcacatgacgttgatcatggtctcaatcttgaaaaagccggcgctaccgctgttgttcctgagacgctggaaccaagtcttcagttagcagctgctgttcttgcacaggccaaattacctacatcagaaatagcaacaacgatcaacgagttcagatctcgtcacttgtctgaactagctgagctatgtgaggcaagtggaagctctctaggttacgggttctcaagaagtacgagcaaaccaaaaccaccatcaccatctgaaacatctgacgataaccagattattgaaggcacactcgctatctaaccttttttctcgcttctggtaagaccacacaatttcaacttcttttgcttaaaactgtacagaaaccaaaatccttattttgaagaatcttagcggagaaaaagtaacaaactctcaaaattttgatgggatgatgatgtgttgaaatttctctagtttctttcctctgggggaaaaacaaaggcaaataatatttgtattcaacaaaaaaaaaaaaaaaaaa

SEQ ID NO: 555 - DNA, 549 bp, Arabidopsis thaliana
ccacgcgtccgagcaaatgatgactctacagcaatcactatctcagaatagaaatacagccagccaggatgcggggcaaactggtgctgccacaggaaataacggggggctggatttattgatgaatatgtttggcagtcttggtgctggcggcctgagtggcacgaaccaatccaatgttcctcctgaagagcggtacgctactcaattgcaacagttgcaggaaatgggattctatgacagagcagagaacattagggcgttgcttgcaaccaatggtaacgttaacgctgctgtagaacgactcttggggagtatcggacagtagcatacaggttcatgaactgatgtctctccatctggcttctcagttatagaataaacagcttgaatgtgtgtttttcagtaatgatatattcatcgaattcataaaaatttatatatgataggatcgtgaactttgttgatagaaaagccgcatcaatacggtatttgttatcaaaaaaaaaaaaaaaaaaaaaaaaaaaaaaaaaaaaaaaaaaaaaaaaa

SEQ ID NO: 556 - DNA, 549 bp, Arabidopsis thaliana
  misc_feature (1)...(549): n = A,T,C or G
ccacgcgtccgcgtctcctaaatgggtcttaccccaactgcaaccctactcgtcgctgttttcgcgttttgcctcgtcgctgtaacggcgcagttcgcctacgttttgtggtggaaacgtcggttccgtcgtcggagtatcgccggatcagaacgcgacgctttttcctctcgcggtggtgacctaacggctacaccaccgccatcgaaagagcttctttacttcttcttgttctgtctcgaaaacaaacagttcagaataggatctgccaccgctccgccgctccctgcagccgcaccgccggttaatgacgtggcatcaaagtggtcaataaacggagaaaatttactttgcggaccttcggagactttgtttaccatcgctgaagactatactagcgagtccgatcatcggacgnntgagattgatccacgtggaagcatctttacagaggatcatgtaaaggatgatgaagtggaagaggaggtagnnnngacggatataagcgacgacgaggttgactttagccactataatcaaactacgccg

SEQ ID NO: 557 - DNA, 549 bp, Arabidopsis thaliana
ttattagatatgacttttactttcttgtttagtttacaactgctagctcagttcttgatcttattcgaacatgaaggtttcatacataatgattcacaaataaacatgaacctttccttcttatctcatttgaagcatcagcagctccggtttctcgacatactctttccactggcagcaaaaccgagctaccgttgccccatctagaactctatgatccgcagcaatgttaaccatcattatcgatgcaggatagacagttccttcttttgagaattttggaactttctcgattcttccaagagcgatgattgcaacttccggtaagtttaaaagaggggatccgaatttaccaccaattgctccaatgttactcagagttatggttccaccagtcacatcctcggggttaagtttgttgtttgctgccaaatgttgtaaccgggacagctctttggttatctctagcagagataatgactgaacattctttatattaggaacgacaaggccatgttcagtggccattgcaactccaatattatgtga

SEQ ID NO: 558 - DNA, 549 bp, Arabidopsis thaliana
  misc_feature (1)...(549): n = A,T,C or G
tttttttgatttgtagaagctataaagataatgttgacaacagatacattggggccgtgaattgggtattctacaccgaaaacctcacgacaatatttttaccaaccatgacgaaattaagcattaccaaagtccccatataatgaatccccaaacgagtaaagagaacaaaatctaattatctaacgaggataaaaagtagaaaaaaaggaagctaattgatatatgggaaaattgaaaggaaaaaaagtccaaatcttcttatgaagccaaagctggttgggttattgggatgagtttatatctgaacggacctggatggtgaagaatcatcaaattgagggggaagtggtggtggtagtagaggaagcagaggcacagctgttaccagtctgcttagccacatagatttgcttgacctttgggttattcggaaagcctctctctctggccatgggttggtttctgccatggtagcccaatctccggtttnnntggtgctggtgttggtggtggtggctgggcccaccaacatgctgagactgcgtg

SEQ ID NO: 559 - DNA, 548 bp, Arabidopsis thaliana
atatatcaacaaagggcctactgatacggcccattaacataaaataaataagacattatagtccaattctgagcgatgggccaaatggcccaaatcttcacataagaagcccgttattaccaacaaacgaaaaccaagaacagtaagaaactcttatcaatctgttcatcataatttggtctacttgttgttgtagaatctgagagcgaaagcaacgccgagtatcaagagaggaattaagtagataagcagcttctttccagattcttctttagttgtttccgccgccgtagattccttctcccacggcggaatatactgttgcgtcaccggaaccgttgactggtcaacgtcaccgatacagtatttcttcattagctccttggcatctttgctatggttcacatcttcgaaatcgatcgacgcgtctttccctttaaattttcataaaaactcacaaaattacaaaccgataaattcaaactaaaccggaataaaccaactcgtactcgtacgtaccggtgacggcgaggagaacattgtcacct

SEQ ID NO: 560 - DNA, 548 bp, Arabidopsis thaliana
  misc_feature (1)...(548): n = A,T,C or G
cggccgcctcacagtacagcaactgagtattgagacaaattttgatttgcctaaaaaaaaccaaaagcatagataaaagagagagagagacaagggattagcatgaatgatcaaggagacgagtggtttcttctattcacaagcaagcttggtgtcaaagctgcttaagcatatcgcaaacgcctgaaacgccgataatggatacctatagtccattgtgaacatatctttccctactttaccaaactggagaatcaccttgtcttgctcagggtgagcaggtgcacttgttggtgctgctgctgcacctgtcccttgaggctgcggctgtcttgctgctacaagctggaaattcttaaccgatgcaactgtcacacgtccgcggaaattcaaacaccagcattgcaactgctcgtgccaccttggctgcttgttctttagaatcaacggtctgaaactcgcttcttcttcgnngtcgtcgcnnnatattcccatttcggagaatctagaactgctgaaatcgagggagcggtggtcaaatgatgatt

SEQ ID NO: 561 - DNA, 548 bp, Arabidopsis thaliana
acacttgattgatactataattcaactgtttaaaaataagttataagtatgagactaacttattagatctctataatacatttgacttagcttttatgcttgcttaggcgaccaaaaataaataacaatcaccaactgtaagaagaataatttcggaggaaaactatatgccaagtcagcctattttacccatatgaagactgtcggtggtcgccggtgccgacagttgactttgcggtcccgccggagatccaaatcccaacatgtccgctggttgttgttgcacggtctgcatctgatttcccgccggcggcatctggggaatcccgcccatgtacctagcgagctgctccgataagatttggttctgtgcttggagctgcaactgtaccgggttttgacatactaaaccgggatggttctgcggacggaccggttcataaccgggaattgagacaattgcatctgactttgcatagccatctgattaatgtatggagatgattgtaccccgggaaacatcatcggacttgctgctgctgctgccg

SEQ ID NO: 562 - DNA, 548 bp, Arabidopsis thaliana
  misc_feature (1)...(548): n = A,T,C or G
tttttttttaaaggaaacttttgaatattaagtattaatcaaaatctaaatacaatgtaactttagtgaccatttaaattcgatgtataggattaggaaccggtccaaaccaaaagaaaccgatgtttggttatgcagtgactctaagccatcaaagaagctcttgccattgctaaggcaccttcataggtttggtttgcaccaatgaaaccactcatatgcacaaaaacacagcgtggaattgagctttcctctgagagcttctccttttctaaacctctccatgctaatggcaaagctttacggctctcaaacctctctggtgaaaccgaaactgcttgtattctccagttttcgcttctatcatcctggtaaagaacatattnnattggaggatcaatcttcatttcttcctcgagctcgaatatatggagtttccatgggcattgtttactgagcttcataatttctccactggagtctatatcataccgttttgtaagacactccataacaattgaccgagctggtaaccacgatttcgcgtg

SEQ ID NO: 563 - DNA, 548 bp, Arabidopsis thaliana
  misc_feature (1)...(548): n = A,T,C or G
agagcagctctgggagattcgggtggcattgaggtaaatacgggtcatcatcctctgtgcggctgaaggaagtgagtacagaccggcagaatatgaatctgagaatcagccgtctcaagaatggatcaggtaagacctgtgcccagacaagattcaagactttggaagtcaagagaatcgtttcccactcggaaaaggaagcagaaagtatgctctctgcttcatcacataattcagggtcaggtttggtgtttgagaggcccancatttgacagaatgcttgtaaaggagctgttaagaaaaaagtaaactgacttccatttagtgcttccgtatcatcagtagatgggttctcgaatgatggcttcagaggagaaagaagcatagcaacaggctcgcctctctctgcgccgcccaaaaccttgaatgcacggctagtgtcgctatcaatgatcaagaaaagtggtttccgtgtaaaagggattaggtcaccagggtaaaggttgtttgaaccagagcttcctcctctaggacctaaccagaggtga

SEQ ID NO: 564 - DNA, 548 bp, Arabidopsis thaliana
cttttttttttttttttttaggattaaatagctgattttattactttttgttacaccaaggtttaaatttatgggccgagcccataacagtttcagagataacccaatagaagataaccggaaatggaacagatctagatgtgttgacaaattataccaaaccaaaaaacagagcatgaatcatccggatgtaagtagattttagtcttaattcctagaaaaagagatgttcttgttcagaagtctacctgttattctaagaataggatgattttaatatcattgacgtcttctaactactcttaacttcacaagtcttcttatctctttgactgatcctatgaagctaagaacttcatacatatcggaggttttactccggcgagggcaagcaccgccgcaggtaaagtccaaagcccttcgccacagattagccctgaagccaccgccggaaccataaactctgctttcttccgattcatcttctcccaaacaaacacaatcaaagtcccaacacacatgtcgattgcgaaataagctccgacaag

SEQ ID NO: 565 - DNA, 548 bp, Arabidopsis thaliana
ggttctattacagctggatccattcctcaatgaactcacgagcatgtttgagaaaagcaaagagaagggttctgtgtgggttactttgaaaagatcatctctcaagtctaaggtgcagaagaggaaactgagctcagttggagaatccattgaatacagatgccttattcgagcaaccgatggaaagaaaactgtttctacttcggttggtgctaaggatcaccagagatttcaagcatcatatgccaccattcttaaggcccacatgactgctttgaagaagagggaaaggaaagaccggaagaaatcgacagaggcagagaagaaagaaagcacttcaaccactaaatctaagaaactttgatttctccttttgtgtttctcattgatttgcaattgctgcttaagagttgaattttgaaagctattgaaagatctaaaagattttgacttgtgttataatagagattttggtttgcatttgcttttccctcgagaatgttcatcgtgtataaataaaccaattccatacaaatgtacgaacataa

SEQ ID NO: 566 - DNA, 548 bp, Arabidopsis thaliana
  misc_feature (1)...(548): n = A,T,C or G
ttttttttttttttttttttgcaccaccactaatttttctctatttaaattgatttcttaataaaaaaatttacaaatttcaatccatctaaagtactcaaaaaatcaaaaaacaaatagtacaaaaaaaagtcaagccgaggcaaacactaaatcattaatgcctgaagaagaaatattctcctgcatcgcggattggttatgacggtgctctccttcgtatgtcacaataagcatcgctggatcatctaatgctcgttccacgtgtttcctcgctggacatcctctgaatgtactgcacttgtagtaaccacgtgggtgtggtgagcccttgatcggtttttgtccgtacttcctccacgaatattcgtccggtggaatatcggcgatctttgcacttatcgccggtactctcacggttctcttcatccgatttttccttttcttgcaatggcactttccgtanncggagnnnnnnacttttccggagaaactctctgagtgctcatgctcgagacatctctttctgtaaggatgaccagccaacg

SEQ ID NO: 567 - DNA, 548 bp, Arabidopsis thaliana
ctcacaccatccatattcactatcacttgtatgcatagatatgcatatagatgtacatagatatcttacttcctagttctaatttgagttacaaaaatgttgaaatttccactttgttgcagtgagttatctttagaaccgaagattctagcttttgaaagtcagcttgtttcggggcgacgcgatacaatcaaagtttctgcgggaaaaatcggaaatttctctcttggttcgatattcaaaagttgtgagacttgtggagccaaaggagcaattgaatgtcccggttgcaagggaacaggtaaaaataagaagaacggaaatatgtttgagaggtggaaatgttttgattgtcaaggatttggtatgaagagttgtcctaaatgtggcaagggaggcttgacgcctgaacagagaggggaacgatagacttatactatttgtttttcctacataagttaattttgtgatacaaacatgtctctattcctataacatttcagtcgtataatttgcatgtaaaaataaaaatcattaataaaaaaaaa

SEQ ID NO: 568 - DNA, 547 bp, Arabidopsis thaliana
ttggatatggttgttcggattcttgttaccatgattcggctatagtgtttgtcgcctctgattgtcccaagcatcgttctttactgatttttagatagctctgagatctgtctctgcgattcgtcggatttgaattcgttttttttttttgggtagctcttggatttcttcttctagggtttccaagaggatagagaaaatgcgggtgtcctctgagatactccttctttctttggttccggcgttgactttctatcattctggtttgagttctaatcgtttgaaacctcttcaaaagagtgattggcgtggtaatcttagttaaacaaacaatttctctgttttttctttgttcgatctctttagatcttttcaattttctcttcggtttcgtttgttttcacgcatttcctagctcggagtaagctaatcgaagaagaacaagctttttacagatcgatctttcggtttttttgacgttttgggtgaacgagttacttttgatatgagctctgtctgtggcgggttggatttcaaagatgcagag

SEQ ID NO: 569 - DNA, 547 bp, Arabidopsis thaliana
ctctcatcttcttcatttcttcaccaccatcatcacacaccttcttcttcttcttcttctctctctatcacaagagagtcaaatccatggcttctacttcttccctcgctctctctcaagctctcctagctcgtgcaatctctcaccatggttctgaccaacgtggatctttaccagctttctctggactcaaatccaccggttcacgcgcctcagcttcgtctcgtcgacgtatcgctcaatccatgaccaaaaaccgatctctccgtcctcttgttcgcgctgcagctgttgagactgttgagccaaccactgattcgtcgattgtggacaaatcggtcaactcgattaggtttttggctatcgatgcggtggagaaggccaaatcaggtcatcctggtcttcctatgggttgtgctccgatggctcacattttgtatgatgaggtcatgaggtataaccccaagaacccttattggttcaaccgtgaccgattcgttctatctgctggacatggatgtatgttgctctacgcgttgcttcatct

SEQ ID NO: 570 - DNA, 547 bp, Arabidopsis thaliana
ccacgcgtccgcagttcgatgggaagactttgggaatcactgcccgtgattcttctactcttagttcttcttcttcatcaatcagtctctcaggggtttgaagaatctgaatctactagattggttaacgaagaagtagaagttagtaatgctccagaaatacattgttcccgagaaagaagtcgagcagcttggcagattatacaagattatttgacgccatttgtggaacgggaaagatatgaaattccaaagaattgtaggctgcatcctgataatgatttatacagagatcaggaacatcataaggttcatgttgatgtcttcgaatggaaatgtggttactgcaagaaaagtttcaatgatgagaaatttcttgacaagcatttcagtactagacattataatcttttaaatacgactgatacaaagtgtttagccgacctgtgtggtgcattgcattgtgactttgtattgagctctaagaaacccaagagcaagtgcaaccctcctgctgttgccaaaaaccgtcatctctgcgagagtg

SEQ ID NO: 571 - DNA, 547 bp, Arabidopsis thaliana
caccatcttcttcttatggttcgagatatcaagatgaacacaaagctccttatccatccagttcatacaatggtgtccggtgggataatcctcctcgccaatataataacagaccctcttttcatccgaagccgcattctgaaggtcctgctccagttggaatgagagatccgggaatgtggcatcagagaagtgactagagaaacttgagagagttataaactggtaaacgaagagggtggtgtgaagcaaaaaagccaaaacaccgaggtgatgtggctctaatttaaaaagagaacggttatgttgttgaggtgaaatagtgatatgataaagaagtgagagtgtacatacatgatttcggaatcagaatcacatgcaatgcagattgtgaggagatggttaaaaaaaagaaagccatttgtagagatcgagttagtatttatatgcactcctttgcttattcattgttttttttttttgtgtcaacattattttgttatgtgggttttgaccttgaagtgtatgatgtatatcagtatattca

SEQ ID NO: 572 - DNA, 547 bp, Arabidopsis thaliana
ataaacaagaaccctaagtttttttataagattcgagaaaattcaacaactcaggaaggaagatccttttgctccaatttctcaatcgaaacgatttcaatttcggtttcaacgatgtcgagtttttctgccgagtgttgggacttctctggtcgtaaaccgagcttttcacaaacatgtactcgattgagtcgttacctgaaggagaagggtagttttggagatctgagcttagggatgacatgcaagcccgacgttaatggaggttcacgtcagcctacaatgatgaatctgttcccttgtgaagcttcaggaatggattcttctgctggtcaagaagacattaaaccgaagactatgtttccgagacaatcaagcttttcttcttcctcttcctctgggaccaaagaagatgtacagatgatcaaagagactactaaatctgtgaagccagagtctcaatctgctccgttgactatattctacggtggtcgagttatggtgtttgatgatttttctgctgagaaagctaaagaagtcattgatt

SEQ ID NO: 573 - DNA, 547 bp, Arabidopsis thaliana
aaacactagtcgctcgctgctcttcaattttcttctcgaatctaatcgattgatttctccttcgattcttcaggagaatcactgaagcttttgcctcccaagtagaaagagatatggcaactcttgaagattctttccttgctgatttggacgagttatctgacaatgaagcagaattggacgagaatgatggtgatgttggaaaggaagaagaagatgttgatatggatatggctgatttagagacacttaactatgatgatctcgataatgtttctaagctgcagaagagtcagagatatgctgatattatgcataaagtagaggaggctcttgggaaagattctgatggagctgagaaaggaactgtcttggaagatgatcctgagtataagcttattgtggattgtaatcagctttcggtcgatattgagaatgaaatcgttattgtccacaactttatcaaagacaagtacaagcttaagtttcaagagcttgagtcgttggttcatcaccctattgactatgcatgtgttgtgaagaagat

SEQ ID NO: 574 - DNA, 547 bp, Arabidopsis thaliana
  misc_feature (1)...(547): n = A,T,C or G
tttttttttttttttcaaaatgaatgaagctacagtagttggtaccaactacatctcatttcagattaatgagcttaactacagaagggaaggaatcgggaaccgaacttatggacacaagatttcagatcatcacagatttggtatccaaaggagatgttgtcctaaacaagatactaaaaacaattgaaccaacagatgttatgactcaagcaatagatggagaggactttcatgcttgctacgatctcctcaacatcgtaaggagnacgacacagctccaggtaactccactatcgatattgtacgctgtaggcgcctggaaatacggtgaggagacttatattccaggtggagctgcagattctgattccatgtggagtttctgaagtcatcaaggagaaaaagaacaccagttcatcaaaggagctgcggactcatcttaacagatgaaggcttcgttgttcatnggagaaacagtcctagtgtttgtgacttgatcttgcaggactgtgaagaagctacctcggaatattttggagccgtg

SEQ ID NO: 575 - DNA, 547 bp, Arabidopsis thaliana
ttttgggttcattatcgtctatgagaaatactattggcatggaggatcaggtagccggtgaatcactgaacggtgctgttatgtcattcgaaaagaaaagcccattcttacttgaatgcttgaacgagtactacttaacttacgatgataagtgtttgcgatgcaacggagcagatctcttgacccgagtagctaaacggtttttaaacgggaagaatcggcgtatgaatcaacaggagctgaacattcgaccgtcctctgttttcttcccaatcaactcacaacagatcacaaactattttgcataccctgcaatagaagatgagagatcgcagcaagacgaatcgttcaagaagatactcaatgagtccttaacgttccatttctggaacagcgtaacttcctcactgatccctgaacctgagagccttgtggctaagttccttgatcatagttgtatcagatgctccgatgtattataaaactatttttttgataaaatcatttatatataaagattacatttttgcaaaaaaaaaaaaaaaag

SEQ ID NO: 576 - DNA, 547 bp, Arabidopsis thaliana
ccacgcgtccgagcttggactgtgcatcaacctcttcttcaccttccccttgatgatgaatccagtgtttgagatagtggagaggcgtttctcacgcgggatgtactctgcgtggctcagatgggtactcgtcttagcagtgactctggtggctctttttgtgccaaactttgcagattttttgtcattggttggcagcagcacttgctgtgtgttaggctttgtgttacctgcattgtttcatttattggtgttcaaggaagagatggggtggctgcaatggagttcagacacagcgattgtggtactaggtgtggttcttgctgtgtcgggaacttggagttccctgagtgagatcttctctgtcaaagtgtgagcgtccgtgaagtcagagattggagaggtttttctctccttgtgtgcaattatgtatatggaattggttgtggttttaagagtaactgtgattgtatttgtattttgatggtttggaataaaagagatcagctctgtcttctaaaaaaaaaaaaaaaaaaaaaaaaaaaag

SEQ ID NO: 577 - DNA, 547 bp, Arabidopsis thaliana
ctataaataaagctgcttattcagtaacataagacaacaaaaagtacatttatagaaggagaagaagacaatggaagtcacaagaatccaaacaaagccaaacaacatttgggtcgttgaacaaactacgaatatcactacaagtcccaaccaatttgcatacagaaagtcttgaaaaggctttacaaagttctgaaaaataatttttctcttctcttttgttttgtacacatcaagatgtctcttccttgagcctgtacaacgtgatttcttgctgcttgaagtaacggcgatcctcttcatccaccagcacaagatttagataatactttacgctgaatttgttgtttatgttcttatgcgttggtgtcagatcgtatggtgtcaagaacactcttacaggtatcgattcgcctctaactggagcaccatccattaactcaaatttggctagtgtttctgtttcgacgtgagtattagctcctgctccagttgattctcgccgtcttatctcaagatccatattctttatcttgcggacgcgtgg

SEQ ID NO: 578 - DNA, 547 bp, Arabidopsis thaliana
ttttttttttttttttttgaaaatatacaattcttatttataaccaacacaaagtacaactttgatctttttctccacattcaatcattcatttttggaagaaacgaggaccaaacattttcacacaacaaaaagcaagccaagcaaattaaaacgctataggattgatcaagggtagctttctgtggtgggagctggagcgtaggatccgatgaagacgtctccgtagatgagtccggcaagtgcaccaccgactagtggacccacccagtagatccatatctgagagaagtcaccactgacaacagctggtccaaatgacctggccgggttcatggaaccaccgctaaagggacccgctgcgaggatgttggcaccaacgatgaaaccgatagcaattggagcaatggtcccgagtgaacctttctttggatcagccgctgtggcgtagactgtgtagaccagagcaaaggtcaccacaatctccatcactactccttcaatagctcctaaaccggccgctactccatgagtcggtacgctctcg

SEQ ID NO: 579 - DNA, 547 bp, Arabidopsis thaliana
cttttttttttttttttaatccacaatcattaacttcttactaaagaagagaaattggtactggaaaacaaacgagacactttacgtagacgaaaacatacacatggtcatcaccatccgtaaactaaacaagaacttaagtacgcacaggaaactacacaagatataactacatggaaagatttaaaccggattaatattacatccgtgtggggaagtttgatttaggtcttggtcctgaatttggattcgtctatctcgactccttcctcctcagcgtgttccccaccaggcttgtctccggtgctaagaccacctttgcgtcccatctgctgatatccttcagttcctaactgctcctttcgagtttgccctcctcggctcctcccttcagcgagatgctgttgagcttcgaagcttttgcctcccgtaccacctggcacgacggtctcgcccttctttgccctctcatccagctgcttcttctcttgttgagacgccatggctctttagttacttacacaacacaagtttatataaaacacta

SEQ ID NO: 580 - DNA, 547 bp, Arabidopsis thaliana
ccacgcgtccgggaaaaacccataaccacaacaatggccaccgaaacccaaatccgaatcggagtaatgggttgcgccgatatcgctcgaaaagtctctcgagcaatccacctcgctcccaacgccacaatctccggcgtagcaagccggtctttagaaaaagccaaagcctttgccaccgccaataactacccagaatcaaccaaaatccacggctcttacgaatctcttctcgaagatccagagatcgatgcgctctatgttcctctccccactagtctccacgttgagtgggctattaaagcagctgagaaagggaaacatatccttttggagaagcctgttgctatgaacgtaactgagtttgataagattgttgatgcttgtgaagctaatggtgttcagattatggatggtactatgtgggttcataatcctagaactgctttgcttaaagagtttctttctgattctgaacgttttggtcagcttaaaactgtaagttttcatgaaagtttatggctttttgaaatgttttgagttggaa

SEQ ID NO: 581 - DNA, 546 bp, Arabidopsis thaliana
tttttattgaatgaacttaataattatttagtcatttacatacgttcatcaagtgtatacatatgaatcaaatattttcacaagatttccatcgatatgtatgtattatatatatcattaattcgatcgtacatgtcgcttggtgattcatcaaaatttcatgttttccttcaagtaacatacgatcgattggagaaggcagaggatgacacaagcagctgcacctgggaacaatgcgtaccagaaattcaagtgatggaactttgctccatctatgaacattagtggtaagctcgccgcaggagggtgattggcacgagtaatgaccataaaagcgatggaagcggcgagggcgacactccgggcgagccagcctgggccaaagacggagaaagctaccaccccaatcgcagcacaacctatttgagccaaaaacatattgtatttccgagcagcaggagcagaaggggtgatgaaaagaatggcggagactgcgccaagtggtgcaactgacattgaaatgcctttcggagatagcatttgatc

SEQ ID NO: 582 - DNA, 546 bp, Arabidopsis thaliana
agcggccgcccgggcaggtcgcagcttttagatattttctttccccgttcttccggattttttttctccccctctcaagcaaagcattatcgctattgctctgccttgtgagctgcgatcacctgtttactgagagaagaacactgcgacgtcgttaaaagtaggttgagagcgagaaaggccgagagaatggagatggaagaaggagcaagcggtgttggtgagaagataaagattggagtctgcgtcatggaaaagaaggttttctcagctcccatgggggaaattctcgacagactccagtcttttggtgaatttgagatcttacattttggggataaagttatacttgaagatccaatagaaagttggcccatttgtgattgcttgattgcttttcattcctctggatatcctcttgagaaggctcaggcatatgctgctttaagaaagccatttttagtgaatgaacttgatccgcaatatcttcttcatgatcgccggaaggtgtatgagcatcttgagatgtatggcatcccagttcct

SEQ ID NO: 583 - DNA, 546 bp, Arabidopsis thaliana
ctttttttttttttttttttttttggatccaagaaggataaatttatctggttatagagttaaaaatacagcagtgatcagtgatttcggtgttgtgtgattctcatgtttcaaaagaaaaaacgagtaaacaattagggaagatgaagaatttttctcttttttctttggtacagttcaaagaatgaaacagaaaagggaagaaaagaaatcagaatcctcatggacgccgtagtgaagaagagcattcattggagctctgatggatcttgaagaagagatgctctttgtggatttaaaagcagaagttgctgcatgtcctttggaagcacactgaacaccgcttgtagatccttcttcagtttctgaaacgttccttctgaatctgcacctcctcctgattccagcgacttgacttcctcactaatgtgtttctcaatggcattgaaggaatccacagcttccaattcattcatctgagacgtaatctgcctcatatcagtcttcattctagctagcctccataatctacgctgttcttgttca

SEQ ID NO: 584 - DNA, 546 bp, Arabidopsis thaliana
  misc_feature (1)...(546): n = A,T,C or G
agaaccagaaggtattattatggtgaggaaaaaaaaagtacataccctagagactagtagtagtagtacacacagtttacaacgcccatgtaataagagagctngggggagggaagcatcacaagttacaaactaacaacaacaacaaaaagtacaatcccaaactagacagacgtactcttagtacaaacctcaacccaaaagagatcactgaaaaaccttcgaatccaacggaagaaccggaagtaaaaaaaaaacggaattgactcaggctcaaattcgtacacgcttgacatcagtttgtggaacactgatatcacctccattacctttgcttgaaccatccgttaggcccgtttcatcaggaacaactgcatatctctctgcaggcgacacccagcttttccctgaagatggatcgatattagaagattctatatgttgtccacttgctccatcgacgctgagtgcctctataatcttgggaaagttcctgtcaaccgactctccaatgccgagctgtccatttgtacctcggccgcgacc

SEQ ID NO: 585 - DNA, 546 bp, Arabidopsis thaliana
cggccgctagacattcacgtagcaatccaaggtccctccgatggtcctatagtcctcctcctccatggtttccctgagctttggtactcatggcgccaccagatccctggactcgccgctcgtggctaccgtgccgtcgctcctgacctacgtggttacggtgactccgatgctcccgctgagatctcttcctacacatgcttcaacatcgttggtgacttaatcgccgtcatatccgccttaaccgcctcagaggatgagaaggtctttgtggttggacatgattggggagctctcatcgcttggtatttatgtctcttccgaccagatagagtcaaagctctggtcaacctcagtgttccgttctctttccggccaaccgatccatcggtgaagcccgttgatcgcatgcgtgctttctacggcgatgattactatatctgcaggtttcaggaatttggagatgtagaagctgagattgcagaggttggaacagagagagtcatgaagagactactcacttatagaactcctggaccggtaatt

SEQ ID NO: 586 - DNA, 546 bp, Arabidopsis thaliana
cgcaccggcattgcagacgacgttcgtgtcatcaaccaacttcctgaaacattcttcttcgtggggatcatcatcaccaaacaatgtgattcttcccaaaaacaagagatcttctacctccgtagttgtcgccgccgtcggtgatgtctcttctgacggaacaatctacttaatcggcggagccatcgccgttgcactcgtcggaactgcatttccgatcctcttcaaacgcaaagacacgtgtccggaatgtgatggagcaggatttgtgaggaaaggaggagtgactctgagagccaacgccgcacggaaggatcttcctcagatcgtttgtgctaattgcaatggactcggaaagcttaaccagattgataaatcataagtcttcttcatatatatgtaaaaagctccatttctcattcctcttcttatctacaatatacctctgtaagagtagatagcttcgaatgatcaatggttgcttggagatggatggatatatatatacaattgcttttttaaaaaaaaaaaaaaaaaaaaaaaaag

SEQ ID NO: 587 - DNA, 546 bp, Arabidopsis thaliana
tttttttttttttgacccaagtcgatctttattgcaaaccaaattgtcacacacgcaaaaaacaaaccttaacaatacagaaattaagaaaagaaaacaaaagcagaaccattgacgaggcaaagacgcgccgtcgaaaaaaaaagaaaaaaggagacttgttttttctgatgatgtataagattattagagagtttataaagtaaaatatttgctcagaagaggcatgcttgagttactattggtttaggggtcatccggcgactttcctagagtaggcattggtggtgggttgtgttggtctaaggaacatgtcacgtgtttctcctacccaacctgccttcatcggaggtggtttcagctgttgatgctgtccaaccacagacacagagtgtcttcgagatccagttgctccaatggtcatgtttgcgagtttatcagcagtctcggatacactactacgagtgacccggttcttgttcaacgatgctgctggaggactcttttttccgggtggtctgtatttggagtctctgacagaacttc

SEQ ID NO: 588 - DNA, 546 bp, Arabidopsis thaliana
ccacgcgtccgggtaatgaaggagttgaggtcataaatccagaaggtggcaaggaagatgctgaagaggaagctcagaaaggaaggtggaaggacgaggaacgagatagttactggaagatgatgcagaaatatataggttcggatattacgtcaatggtggctcttcctgttgttatatttgagcctatgactatgctccagaagatggctgagataatggagtattctcatttgttggatcaagcagatgaatgcgaagatccatacttgcgtttagtatatgcttcatcatgggctatatctgtttactatgccttccaacgaacttggaagcctttcaatcctattcttggggagacatatgagatggtcaaccatggtgggatttcttttatttctgagcaggttagccatcatccaccaatgagtgctggtcatgccgagaacgagcacttcatttacgacatcacatcaaagttgaaaactaaacttttgggtaactctgttgatgtttaccctgtgggaagaacgcgtgtaaccctca

SEQ ID NO: 589 - DNA, 546 bp, Arabidopsis thaliana
ccacgcgtccgattttgccaacgaacgttctttcttcttaatcacagctcagcctgacgcaaccgctcaggctgatctcttccaatttacagccatttcccagctcagatctctgatccggtgagatctctctcaaggaaaaggagttagagcatcatcaagatgaaggcactcattcttgttggaggcttcggcactcgcttgagaccattgactctcagtttcccaaagccccttgttgattttgctaataaacccatgatccttcatcagatagaggctcttaaggcagttggagttgatgaagtggttttggccatcaattatcagccagaggtgatgctgaacttcttgaaggactttgagaccaagctggaaatcaaaatcacttgctcacaagagaccgagccactaggtaccgctggtcctctggctctagcgagagacaaattgcttgatggatctggagagcccttctttgttcttaacagtgatgtgattagtgagtaccctcttaaagaaatgcttgagtttcacaaatctcac

SEQ ID NO: 590 - DNA, 546 bp, Arabidopsis thaliana
ctttttttttttttttgatgtacaataaacagaataatctcatttccaaaacttctggcaaaacattatattttctcaagggaacaaaacacacagacaagtcgaaactttatgggtttgtagcaagtttgttgaaggcggcgtgaactctctcttccgtgaacagtctatggttttcatagaaatctaatatctccattgcaatattcttcacaatgttcatgtcgacagaaagctcttcaaaccatgtctttatgtctttctctttgtgtacagaagcaatgtaaatgcaagcgagtgttatgagaaacggcggatgtataaggatgaggtccattctatatgtgtcgttgacaagaccccaagttagatgggtcatactagtgtcattgattccagaatcctgcaagaactcaggcagagatcgatatgggtggaatacaacaagatagaagttcaatgcttccaagaccttcatctccatttccagaatatctttaatctcatatcgaaacttttcatccgcatctacagagagtgaaagca

SEQ ID NO: 591 - DNA, 546 bp, Arabidopsis thaliana
tttaagaaaaaaccaattcaagaagaaaataattcattacaaaaccataataaacatccattttctccatcttttttttccagatttaatgatgaaaacccccacagaagacaaggttgcaatcagactctgtgacactattacatgacagagaagaaacatatccttcaagagtcaaagcagctcagaggaaagcgtccttctcaagtagtttcaccacatctagctgattgtttagcctggccacatcaatgggatttttattgtccatgttttgctgagttactgcagcaccattctctaggaggaggcttacacactctttccttccataaccagcagcatagtgcaatggtgtgttcttgtttttgtcaatcgcatttgcatttgctccagcatccagaagaacctgagcacatctcacctcgccgtatccacatgcaaaatgcaaagcagtccttccctcagagtcttcttcatctttgttcccaccagatgccaaggcagctttcaaaccctcgacatcaccaagactagcggtctggt

SEQ ID NO: 592 - DNA, 546 bp, Arabidopsis thaliana
  misc_feature (1)...(546): n = A,T,C or G
ccacgcgtccgatctagacaaagagtgttgtctgaattggctctgtctcaaaaaatgaaattctcaaattaaccacaacgatctttagagccttcttcgctcaccgatctctgaaaccctggtagtttctatgagtatgtcgcagtctcgagctgtccaaagatcgtcttcacctaatgaggatagaggtgagaatcagttagtggtttatgacttgaaaggaaatgatgatactgangnnnnngttctaccggttcaatctcagcctttgtcatctagaacacagtgtccctctatcggggcatttacggttcagtgtgcaagttgtttcaaatggagactcatgccttcaatgcagaagtatgaagagattagggaacagcttcttgaaaacccgtttttctgcgatacagcgcgtgagtggaagccggatatttcttgtgatgttcctgctgatatctatcaagatggaactcgtctttgggctattgataaaccgaatatctctcgtccacccgctggctggcaacgtttactgcggattag

SEQ ID NO: 593 - DNA, 546 bp, Arabidopsis thaliana
tcacaaccagcttagtggcgtcataccgagtaatctgttcatatctgcaaagttgacggaactcaacttgtcaaacaataatttctctggttctcttcctcttcaagatgcaagtactgtgggaaaccttagcttgaccaatattggtctgtctcataactcgttaggtggagttctctcagaggaactaactcgcttccacaatctgatttctcttgacctttcttataacaactttgaagggaatatccctgatggccttccagacagcctaaagatgttcactgtctctgccaataatctctctggaaatgtgccggagaatcttagacggtttccagattcagcgtttcatccagggaacgctttactgaatgtccccatttctctaccaaaagataaaacagatataaccttacggaagcatgggtatcatatgaagacttctgtaaaggcagccctgatcataggcttggtcgtgggtactgctctacttgctcttgtttgcgtaatgtttcattttatgttgagaaagcaacatgatga

SEQ ID NO: 594 - DNA, 545 bp, Arabidopsis thaliana
ctttttttttttttttttttattatgacaaacgtaaattcgcaaatttattacaaaaaagaaaaacagcttcgttgcaaccaaattattgataagtaataaacatctcgaagaaattgaaaaacacaaaataactagtgatgttgtgggtcgggtcctcctgggcttaaccgctctggagatttcccatggctacccgcagcttgatcatcctctacagtcggactcgtagcctcgatagaagggcttaggcctctcaccttcaccccgacccgagccccctcaagagggcggcttccagcggcgattgaggataacagaagaaacaacaagaagcagaaagtgaagcttaacttagccattacagatacaattaattagtttctgtatatatagaaaagcaatagaaagagagatagattgttcacgtggtgtgtatgagtgtatatgaggaaagaagagatctcatgagggtttctatttatagagttttatttgaattctagtagtgcgcgagataggtttagctagcttaaggcttgagtg

SEQ ID NO: 595 - DNA, 545 bp, Arabidopsis thaliana
ttttttaaaacccaaactaacaacttaaattcaaagcaacatttacattaatagtagtagaaataacttttgcatattcatagtattataaaagagcatataatatacacataagcacaaaagcattgaaaggcacacatttaaaccaaaccaaaggtgttctctccactgtaagtcatgtagagaaacccatcttcgtctttgttctcatcatagattgcagacatcattgcagcagttggaggcaatgtgttcttcacaaagacgaagatcgccttttcggcactcagtttgattcttttacggacaacatacacaaactgccccacagttagatcagccggaacaaggtacttcttcttgtcgatattgggaacatcacttctttcagctctctctacgatcactggaattctgtctggatacttctccctgatgcgagaagattcaatttgtctcctctctagtgggtgttccaacttgaaagagctattagccatggcgattaaagaatcaaagattagggcttctcggtttccctaaat

SEQ ID NO: 596 - DNA, 545 bp, Arabidopsis thaliana
  misc_feature (1)...(545): n = A,T,C or G
tttttagtcggccaaattccattaaaacggaagcccaatgggcagtacaaagaagtgaaaattacataagcccattctccaacatatacatccttgattaggttaacaacnncttaatcttaaactaaataaagtaaaagattaagaaaataaggagccaccacgtgtaacaccacgtgtaacaccacgtgttaacacataagaaggagaaggagaagcagtcggcgccgggcaaatctgcgagttgactcagcacctccgttggcttcaagcaaccaccaccgtactccttctacagttttcgtcttgcagatctgatgaacaatcaccggttccgtctgaaagaagctcaaagaagacttgaagaaatctttatcccttaacccaatctcctaaattggaagctccgcctgagaccaaaagaaagtcctcgactacaacagagtcatatgaagcggcgaagatgttactccgatcaaagagaggaggcaagccgacggtaggaggaagagatccagagatcgcaagaggataatggattgaaa

SEQ ID NO: 597 - DNA, 545 bp, Arabidopsis thaliana
ccttgattagtgtcctaacgttaatacaactgagaaacaaatagagtaaatttagttaagttcagaatctaagactgaagagtactaaaccagattcgaggattacgactagatgaagaaaactaaccctaaaagaaggttataaagagagagagagggatcagagtcgtgaaaacagagttaataactagctctttgaatgaaaacggtttctaggtccggcggagagaagtaatctctagtgacggtgacgtaactgcacttcaacgacggtttacgcttctttggcgccgctggacacggcgggacccttggaattctgacggaaaccgccgtaggggtcgtaggacactgatcttgctcctctgtttcggtaactgtgacgccgggagataggttaatctgcttgagaggggaacgtgagggaattccggcgatgacccattttttaccgtcggtggattctcgtatctcgccgtcgagttggtggtgaggtttgccggaatatcccatgacttctctcgaatgtgaatgaagaggaaaca

SEQ ID NO: 598 - DNA, 545 bp, Arabidopsis thaliana
taatggcagcgttgggagaatcatcatcctcagagatggacaacgcgaaatcgccggagattcaacaatcttcgccagtgcatccgccggagtatcagaagatcgcaacgacgacggtggaaaatgcggcttcctggatcgatgatgcgttgcgtcaggcgcttgtttaccagaagacgatcacggagacggtggattctaccattgacgcctccaaagctcgattgtctcagattcgagatacttctgtagctcacacgagccaaaccatcgattctcttcgagacattgcttctgagtataacgtttacgagcaaatggtgtttgggaagatcaaagatggtgtgaatgttgctgcatctcatccgctaatatcaggcaccttagcttttggagttgggatttttgctctgaaaaagaccagaagatttgtatattacaatactgtacgcatgtttgttagtgaagaggctttgctttctagagcagatcttaaagtaaaagagttgcgacaatcaatggatcgtcttaaagccgagagtgaa

SEQ ID NO: 599 - DNA, 545 bp, Arabidopsis thaliana
ccacgcgtccgtcaacttttgctttctggtatcttctctaattaaatacttcatatattcctcctaaagttgcttcattattctctaaccctttagttctttaaactctctattatttcgaaaagtccgctttctacgtttttaatttactgttgttatggtgagaaagcgtgaaaccaatcccggtgttagagttgtcggaaaaagaatttatgactcccaaaatggcaaatcatgtcaccagtgtcgacagaagactcttgactttgctgcaccgtgcaaggcaatgaggaggaagaagctatgtcccataaagttttgttacaaatgcttatcaatcaggtatggtgaaaatgcagaagaagtagcaaagttggatgattggatatgtcctctgtgcagaggcatctgcatctgtagtgtatgcagaaaagcccaaggactagagcccactgggattttggcacacgaagctaaagcccgtggatattcctcagtctatgcgcttcttgaagctgaggggcatgataagtttgcttatcaga

SEQ ID NO: 600 - DNA, 545 bp, Arabidopsis thaliana
ccacgcgtccgcaaatctcaatctttctctcctgcgttttaatttctctcggattgaaatcatccatggctgccaccgcaaccgagaagctccctcagctcaaatccgccgtcgatggacttactgagatgagcgagaatgagaagagtggattcatcaacctcgtttcacgttacctcagtggtgaagcccagcacattgaatggagcaagatccagacacctactgatgaaattgttgttccttatgataaaatggctaacgtctctgaagatgcttccgagaccaaatatctgttggacaagcttgttgtgctgaagcttaatggaggtttgggaaccacaatgggatgcactggtccaaaatcggttattgaagttcgtgatggtttgacatttcttgacctgattgttatccagattgagaatctcaacaacaagtataactgcaaggttcctttggttcttatgaactcattcaatacacatgatgacacacaaaagattgtggaaaaatacaccaagtcaaatgttgatattcacact

SEQ ID NO: 601 - DNA, 545 bp, Arabidopsis thaliana
  misc_feature (1)...(545): n = A,T,C or G
atagcaaaagatcatgcaatgagtactatatctcttaggctacactcttacacacgctatgtcacaagcataatataacaacattctagtgttcaagaaccctaactctgaacttaatccactcgtgttggcgagagactatcaacagaaaagccctacataaatcccagtcgcttagaacgtaagaaacaacatctatgaagacgaaggaacccatagagatgaagcatacacgattctacctttccacccttgaagtaaccagttaccgttttgatcaacatcgaagtttttatcgtacccgttttcgattttcaacttcagattctgcatcagttccttctcaagcggaagntgtctaaatccggctcggatcagtctcgcctgccactgcttatatgtctctggtctctccactctctctgttccttcacaagccacaacattcacaatctctctcccataaaactctttctcatacatcagcctcatctcgtcttccctagctagcttcgagtcacacatatcaaacacagccgagtaat

SEQ ID NO: 602 - DNA, 545 bp, Arabidopsis thaliana
cggccgctatgtatggaaaaacctcaccacacccaacacaatgtctgatgaactttattatgcagccgagacagagtttccggctttttaatgacacaataacagaccaattccaggttcacaactaaaactagaaagacatattggtcgtcccatacaagaagaccagtataataatcccaaatcggaatcaaattctattagcagtggagcctgagaagcttgagacgattcgggtacagccagtggccagttttcattttcaaccagatatcacaggtgaaactggagaattcgatcttgatcttgatcttgattttgatcttgattgggaccttgagacagagctgtatagcgagcgagaacgactaaggggccgtgaacgcggggaaatggatctagcaggtgacacactcctgctcttgctactatagctacagcttggaccacggctccgactcctgcttctatagcttttagaatcatctgggcttcgactcacactcctcgactcatattccctcacccgtatataagcactagag

SEQ ID NO: 603 - DNA, 545 bp, Arabidopsis thaliana
ccacgcgtccgaaaatacaaatcgactttcatattttctctgcataagagagaaagaaaatgggatctcatgtcgcacaaaaacaacacgtagtttgcgttccttatccggctcaaggccacatcaacccaatgatgaaagtggctaaactcctttacgccaaaggcttccatattaccttcgtcaacaccgtctacaaccacaaccgtctcctccggtcccgtgggcctaacgccgttgacgggcttccttctttccggtttgagtccatccctgacggtctacccgagactgacgtggacgtcactcaggacatccctactctttgcgagtccacaatgaagcactgtctcgctccattcaaggagcttctccggcagatcaacgcaagggatgatgttcctcctgtgagctgtatcgtatccgacggttgtatgagcttcacacttgatgctgcggaggagctcggtgtcccggaggttcttttttggacaactagtgcttgtggcttcttggcttacctttactactatcgcttcatcgag

SEQ ID NO: 604 - DNA, 545 bp, Arabidopsis thaliana
aaaaaacaacaaaattagacgagaaaatatctaagaaaggcgtcggaaaattgcaaacagatagatatagagacgacgaagatgcatccgattaatgcggtggttgcggcgaggatgttagccggaatcagtcaatctaacgccttacaaagcgaggcgattccgtttggatcgcttgagtggatcacttacgccggaatctcttgtttccttgttctcttcgccggaattatgtctggtctcactttagggcttatgtctctcggtctcgttgagctcgagattctccaacggagtggtactccaaaagagaagaaacaatctgctgcgatttttccggttgttcagaaacagcatcagcttttagtgactctgcttctgtttaatgctcttgctatggaggggcttcctatatacttggataagatattcaatgagtatgttgctattattctatccgtcactttcgttctattcgttggagaggttattcctcaagctatatgtactagatatggactagcagtgggagctaatttggtctg

SEQ ID NO: 605 - DNA, 545 bp, Arabidopsis thaliana
  misc_feature (1)...(545): n = A,T,C or G
ttttacaaaagtcttttcttttttggggacaaatgttacagaagtcttaaaatgcctaaagctacagagaggctcccatcatttactactgctacactcggaaaactaaacacaaataaatgtatgaaaaacataaacataacagcttccaaaagtttaaagaccagaattgggattgtctcctgcaagaataagagagatctcgagaccgcggctgaaggcttggttaaacatcatacgtgtctggaaggtcgacacaaaagggaaccaggagcagagagcaacgggaagaaatatgngcattcncattaacgcatcatatagccttgctagggaacgaatcgatttccacatccccattcgctttaggactggcttccaagcacacgcaatagaaagaattccccatcctgtcggtataaaagccnatacgcatgcaaatatgtctgtcactgacaagggtgtgagcacaactgctacgattatgccagctagagccatcaataaggatagaccttgtataaacctcagtaaaagctggaaat

SEQ ID NO: 606 - DNA, 545 bp, Arabidopsis thaliana
ccacgcgtccgctcaaaaatctcaactttatctcccaaaacacaaaacaaaaaaaaatggcttccactgctctctcaagcgccatcgtcggaacttcattcatccgtcgttccccagctccaatcagtctccgttcccttccatcagccaacacacaatccctcttcggtctcaaatcaggcaccgctcgtggtggacgtgtcacagccatggctacatacaaggtcaagttcatcacaccagaaggtgagctagaggttgagtgtgacgacgacgtctacgttcttgatgctgctgaggaagctggaatcgatttgccttactcttgccgtgctggttcttgttcgagctgtgctggtaaagttgtgtctggatctgttgatcagtctgaccagagtttccttgatgatgaacagattggtgaagggtttgttctcacttgtgctgcttaccctacctctgatgttaccattgaaacccacaaagaagaagacattgtttaagcctcacctactcaccatcaatcgatgacattttaaactatg

SEQ ID NO: 607 - DNA, 545 bp, Arabidopsis thaliana
cacgcgtccgcccacgcgtccgtttataccaaaaaatataaaataaaaaacactatggcggaaaactacgaccgtgccagtgagttaaaagcattcgacgagatgaagattggcgtgaaaggactcgtcgacgccggagtcacaaatgtcccgcgcattttccataacccgcatgttaacgtagcaaaccctaagcctacatcgacggtggtgatgattccaacaatcgatctaggtggcgtgttcgaatccacggtcgtgcgagagagtgtagttgcgaaggttaaagacgcaatggagaagtttggatttttccaggcgattaaccatggggttccacttgatgtgatggagaagatgataaatggtattcgtcggtttcacgaccaagatccagaagtgaggaaaatgttctatacccgagacaaaaccaaaaagcttaaatatcactctaatgctgatctctatgagtctcctgctgcgagttggagagataccttaagttgtgtcatggctcctgatgttccaaaagcacaggaattacc

SEQ ID NO: 608 - DNA, 545 bp, Arabidopsis thaliana
aaatgtcaaagaacgtttcgagaaactgcttaggatcaatggaagacatcaagaaagtattccaacgattcgacaaaaacaacgatgggaaaatctctatcgatgagcttaaagacgtgataggagctctctctccaaacgcttcacaagaagaaaccaaagcaatgatgaaagagtttgatcttgacggtaatggtttcattgatttggatgagtttgttgctttgtttcaaatcagtgatcaaagtagcaacaatagtgcgattagagatttgaaagaagctttcgatttgtatgatttggatcgtaacggaaggatctcggctaatgagttacactcggttatgaagaatcttggtgagaagtgttcgattcaagattgtcaaaggatgattagtaaagttgattctgatggtgatggttgtgttgattttgaagagtttaagaagatgatgatgataaatggtagtgcttgatagaatcgatttagaatttggaaaagtgatatccttttttttgtttgtaaatattttgttttatgattt

SEQ ID NO: 609 - DNA, 545 bp, Arabidopsis thaliana
cttgtatagattggaattaagcaagaatcttccgtaatcgattcagaataatagaaaaccaaatccttttactgacattatcttttaacatagaaagtcactgaaacaagaaaaacaaaccctatcaaagggaagacaacaaaaaaaagcaagcaagagatgggattcttgataagagtctctctacttgatcttcttcttaggcctcaactggttgctgtgaccacacttcttcttcctgcagttgacagctcttgggtgaagacgagcatagcacttgcggcaaatcatcttatcctgattgtacttacgagcaagcatcatcaaggaaggctcaataatacctcctctaagcctcaacacaagatgaagtgtagattctttctggatgttgtagtcagccaaagtacggccatcttcgagctgctttccggcgaagatcaatctctgctgatccggagggattccttctttgtcttggatcttggccttgacattgtcgatggtgtcgctgctctcgacctcgagagtgatggtcttgccgg

SEQ ID NO: 610 - DNA, 545 bp, Arabidopsis thaliana
ttttatacaccaaatctgatatgattcattttcacttacacaaaccacaaaaaaaaaaatccaatcaaattaccaaacattgcgcaaaccaatcaaccattctacaccggaggtaaaaaaacacaagtaaaaatatcttctactcttcaaaatcaaacttatttatttggtttcttccatttctagttgttccatcttttttccttggtgggtttcaaaagatctttcatcaccttaatctgacgacaatgcaagaaatatcatctttactgtctcttctaagcgcttcggttgttagttctttcgctgctttcaatggatctttgattcttctcgcaatatcaatcgcctcttggttagccatcaccttccatagaccgtcactagcaagaacaagaacatctgtgtgatcatcgatcgatgaatctttaacgtcaggatctgaccgtagatgtgttttgaggcttttgtctccaaaagcacgagaaaccgctagctgcccgttaacccgagggacatctcctggcatgttggatacaaagcct

SEQ ID NO: 611 - DNA, 545 bp, Arabidopsis thaliana
acccaatccttcgctctcaatcttctgccatctccaaatttcgccaaacccatcgagagacgtgaattgatctctctaaaacgagacccatctcgtccaatttcactccgatgttccgtttccacgactttggatactccggcgaccgcttcgacccacaagccctttccggcggaggtttcaaggagtatcatggagctttcatctgttggaactctctccactttgacccacgacggttggcctctcggcgtaggagttcgcttcgccgttgacaaagatggcactcctgttctttgcctcaatcgctctgtctctcctgacaagaggtctgctcttcatgttcagttagaacaatgtggattgaggactcctcagtgtacgatacaaggtagcattggtcgacctggagacgatactgttctaaagcgtcttagtgctacatggaaggaaaagtttggcgaagaagttgaggaagacagtttatatgttgttgcagttgaccgtgttctccaaatggaagatttcatggaggacggaatctg

SEQ ID NO: 612 - DNA, 545 bp, Arabidopsis thaliana
ccacgcgtccgcttctgaggttactgctgctctccgtattactgatggtgctcttgtggtggtcgactgcattgagggtgtgtgtgttcagactgagactgttctacgtcaggctcttggtgagaggattcgacctgtcttgactgtcaacaagatggacaggtgtttccttgagcttcaggttgatggtgaggaggcttaccagactttctcgagggttattgagaacgctaatgtcatcatggctacatacgaggatcctctccttggtgatgttcaggtttacccagagaagggaactgtggcgttttctgctggtctccatggatgggcgtttacactgaccaacttcgccaagatgtatgcttccaagttcggtgttgttgaatctaagatgatggagaggctctggggtgagaatttctttgaccctgccaccaggaagtggagtggcaaaaacactggttccccgacctgcaagcgtgggtttgttcagttctgctatgaacccatcaagcaaattattgctacttgcatgaatgacc

SEQ ID NO: 613 - DNA, 545 bp, Arabidopsis thaliana
ccacgcgtccgatctgaacctcttccctttcctcgaaaatccttctaacatcatcatccatggcttcctctgatttcgatggaatccttttgggaatgggaaacccactcctcgacgtctctgccgtcgtcgaccaacagtttctcgacaaatacgacatcaaattgaacaatgcgattctcgcagaggacaaacatttgcccatgtacgatgaaatgagccagaagttcaatgttgaatacattgctggaggtgctacccagaactcaatcaaagtggcccagtggatgcttcaagttcctggggcaaccagttacatgggatccattggaaaggacaaatacggagaggcaatgaagaaggatgctacagcagctggtgtcaatgtccactattacgaagatgaggcaacacctaccggaacttgcggtgtctgtgttcttggtggagaaagatcgctcattgccaatctttctgctgctaattgctacaaggttgaacacttgaagaagcctgagaactgggctctggttgagaaggccaag

SEQ ID NO: 614 - DNA, 545 bp, Arabidopsis thaliana
cgcccttttttttttttttttttttttttcttgtactggaagataacattaaaaataatccaatgccataagatttgaatctcttttaattatcactgttcaattggaaaaatcatatcaatatagcaaaacaaaccccaaaaaagtgtgcagccatcaatggcgtggaattagggtttttttcttttcttttttcttgaaggtttcaagatggaaaaaaagaagcgaaagctagtgaaattcacttcactgcttcaaaagacctctttcttgaaagagctcatacatcgctgatccaatcttagccggagattcaacaaccttcactccagcatcattcaaactcttaattttgtcctgagccgtacctttaccaccggaaacaatggctccggcatgacccattcgacgacccggtggtgcagtaagtccagcaataaaagcaacaacaggcttctcagtaccacttgcctttatcaatgctgcagcatcttcttctgcagtgcctccgatttctccaatgagaacgataccttctgtttgag

SEQ ID NO: 615 - DNA, 544 bp, Arabidopsis thaliana
aacttgctctgaagccgattgtcatcaatggagatccacccactttcgtctctgctcctgctcgtcgtatcgttgcagttggagaccttcatggcgatctgggtaaagccagagacgcacttcagttggctggcgtcttgagctccgacggacgagaccagtgggtcggccaagacaccgtactagttcaggtaggagatatacttgatcgcggtgatgatgaaatcgcaatactctccttattgaggtcacttgatgatcaggccaaggctaatggtggagctgttttccaggttaatgggaaccacgagacaatgaatgttgaaggggatttcagatatgtagatgcgagagcatttgatgagtgtactgattttcttgactacttggaggactatgcacaagactgggacaaagcgtttaggaattggatttttgagtcaagacaatggaaagaagataggaggagttctcaaacctattgggatcaatggaatgtagtaaagaggcaaaagggagtaattgcaaggtcggtccttctcag

SEQ ID NO: 616 - DNA, 544 bp, Arabidopsis thaliana
caactaaacacatattcgaccgagttgttgtgtgatggactgatgaagatgggcatcctgaaaagtcgtagactgtatcaccagctgaatccgacctccataggccactaccttgggatggatgtgcatgattcttctgctgtgggatatgaccgtcctttgcaacctggttttgtgattacgattgagccaggagtctatattccatcttcatttgactgccctgaaagattccaagggattgggataaggatcgaggatgacgtactgatcactgagacgggctacgaagtgctcacagggtcaatgcctaaggagatcaaacacatagagacattgttgaataatcactgccatgataactctgcgcgaagcttcgccagtttctctttgcaaggttaaaggcttgcatacgaaccgtaacccaagaagattgttttgaattaaacatcattgataataattcaaacgtaaactcctgttccttgcgtttgactcatagaatgtatcaaagcattttgaagaaaaaaaaaaaaaaaaaaaa

SEQ ID NO: 617 - DNA, 544 bp, Arabidopsis thaliana
  misc_feature (1)...(544): n = A,T,C or G
aaagatgcagatcttcgtgaaaaccttgaccggcaagaccatcactctcgaggnnanncagcgacaccatcgacaatgtcaaggccaagatccaagacaaagaaggaatccctccggatcagcagagattgatcttcgccggaaagcagctcgaagatggccgtactttggctgactacaacatccagaaagaatctacacttcatcttgtgttgaggcttagaggaggtattattgagccttccttgatgatgcttgctcgtaagtacaatcaggataagatgatatgccgcaagtgctatgctcgtcttcacccaagagctgtcaactgcaggaagaagaagtgtggtcacagcaaccagttgaggcctaagaagaagatcaagtagagagactcttatcaagaatcccatctcttgcttgcttctttttgttgtcttccctttgatagggtttgtttttcttgtttcagtgactttctatgttaaacgataatgtcagtaaaaggatttggttttctattaaaaaaaaaaaaaaaaaaaaa

SEQ ID NO: 618 - DNA, 544 bp, Arabidopsis thaliana
ctttttttttttttttttaactggaattggagctttttgaaaagacagaaacaggaaattgtcccaacagactgacaaaattaagcctgtaggggattcacagaattacagacacaagccattattacatgatgtgatgttttttcactcttctttactgacaagaccaaaaaacaacataaacattaacaagagagaaagacataaaccaaagacaaaactgacaaaaatttaggttccaaaaccaatgaattatgactcaaaaaaagaatagagatcaatgaagaaagttgaaaaggaaaaacaaaagaacaaaaagacacagtaccttgtcttgggtgatttatttgatatcattaatcacctctcaacttcttcacttcaactcttctttctctattcactttccaggcacaaatcttggtaagtttaaaagtgtattaactcttgcaacaccttcaagtgcagaatactctgttccaggttctgaatccaagttatccgcttcttttatcagcttctcagtttcactttcgtcgagagc

SEQ ID NO: 619 - DNA, 544 bp, Arabidopsis thaliana
  misc_feature (1)...(544): n = A,T,C or G
aacaaaatccggaccataacatacgtgagatgacaataaagttcagaactttaagagaaccgggtgatcagaatcatacaagccaagaatgagcaactcttaggatttcgattattgaagaacaagtttcttgctcagaatcatgtcgtcagtggtgaaatccgcttctttccggaatgttccgcgaccgaaatcaaggttgtatgagtcagtgagaccctccactaagtcgaactccggtttccatccgaggacatgctttgctttctccaccgatgcaaagaaatgctgatcacggaaagggaatgccttcttcttcccaaagtcgaactctttcgggttgtaatgaacaatctctggctccggaaacccaccggcctttgcgcannntttgctaacccatcaaaggtaacatatttctcccccgagatgttgaatatctctctgctggctttctcgttaccaagcacgttgagaaaggctgttgccaagtccttaacgtgaccgagttgtgagatctgtatcccagagtttggaaccggga

SEQ ID NO: 620 - DNA, 544 bp, Arabidopsis thaliana
  misc_feature (1)...(544): n = A,T,C or G
atttcaagtcaagtgatccttatgtgattgtcaaattaggaaatgagtcagcgaagaccaaagtgatcaacaattgcctgaatccagtgtggaatgaggaactgaactttactctgaaagatcctgcagcagttctcgcattggaagtgtttgataaagataggttcaaggcagatgacaagatgggccatgcctctctcagccttcaaccgcttatctcagttgccagactaagacacgtagtccgcgtgtcctctggtgagacaacgcttaggaaagtattaccggatccagagaactgcgtatctcgagagagcacaatcagttgcatagacggagaggtggtgcagagtgtgtggctgaggctgtgtgctgttgaatcgggtgagattgagttgaagataaagttgattgatnnncctggaacaaacaagtagcaatagggtattttatgttagtttgtaacacgagacccgtttgtgactagtataattgcaacatcagtatggtcttgtcttgtttccaagtgtgcctttgtgactac

SEQ ID NO: 621 - DNA, 544 bp, Arabidopsis thaliana
cttttttttttttttttttttttttttttttttttaagaaactttactttggtcttcatgtatgtatcaactacagagtttgatcccaaacaaatctgattttccttgtagaatagaaacatatttcatggaaaatctcagttcatcaaaggcccaaaaaagaacaagtgctaaagctgaaccactacctttaggcgattaagctgctgcaagtggctggagagctttaagagggttcatgataacaccgtcgataagtccatactcttttgcttctttggcactcatgaagaaatcacggtctgtgtcctggtttatcttctccaggctttgaccagtgtggtatgcgaggtaaccgtttaggtttgccttgtgatgcagcatttcatttgcctgaatgtcaatgtcggtttggccaccttgagctccaccaagcggctgatggatcattatccttgagtttggtagactgtatctttttcctttggttccagcactaagcagaaaagctcccatactagcagctagaccaacacaaacagtg

SEQ ID NO: 622 - DNA, 544 bp, Arabidopsis thaliana
ctttttttttttttttttttttttgaaatcaaagcaattcaagatcaaaacacaaagggatttgtctgttcaatatttgtatgtatacatactgattactaaaatctgatcatacgaaattcaagaatcacacggtgcacaaagcaccactagtagtagaagtaattctgcatcaaatctggttagaaagaatcaagaaaactgtatattttctggctaatgaggaaagtccttcactggaacttttaaatccgaagaaacagtagagccaaaaatggtgtcaggatgagaagaaaggtggatacatgtttcctgtgactgttgctcgtgggtagtacagaagggagtgaacattcctggccgttgaagagtactttggtgggaaacccatctttggaaccaactttgattccaggagtcagtttcttggtgaaggagataaccgactgctgtttcccgggtatccgaaagtcttcactcgggttttttccgtctttctctgcaaggagatagttcagtccagggagcccttccattaaaacag

SEQ ID NO: 623 - DNA, 544 bp, Arabidopsis thaliana
  misc_feature (1)...(544): n = A,T,C or G
cttttttttttttttttttcacttaaacataagcgttcaaacatagcaggaggacgctatttgacattacagtttgtttacgtagaactttattacaacattacgccagtaaaaagcagagagaaagagagactcaaacatggtgagtcttgtccgaatcctcgagacttgttgggcgaaaccaggcggtctcctccagcactgctgtgtcctggtgtgcaccctcggcggtggcgctgtgctcagtcgtagagggaccgaagactcctgttttggggtgaggagaccaatatttatcagaatctggctttataacttcgtcaggtactgcacttgcatgcaattcatcctccacgttcttgtcatacgccgaggaatgtccactccgacgtgaagggaagagagcagaggcggtggcgcgtnnnnnnncgcgtgtgttaactaggtgtttccttaagctggtgatcaactgaaagctcttcgatctggtggttgccataaaactgtgtttcttcgtcggagattacaagagagagagatacag

SEQ ID NO: 624 - DNA, 544 bp, Arabidopsis thaliana
acccgagaaaaggtaactgcattatccatgaaagtgtagcatcagtttgagtacaaaagagaatacaaactcataaagaaaacagtcaagacctgacgttcatgggagttgagctcttctaagactagtgggttatgcttaggaatcatgagatggatttggcacgagcatttggatcctcctttgactcgagaaacatcatgaaaacataaccgagagaccagaggagaatgtattgaaatggaacccaagagaggcatgccaatagagacatgatactcccaacatactgtggatctctaatgactccaaatgggaactctgtaacccatggtatgttcttcccgaatcgaacaccgtaataagtcccagcttcacctaacaattggtataccctgaagttgagaaactggccaaaggccatgagaggccagaagtagagcggagacggccaggagagagaagcaacggagaagagagaaaggagttgagcagccttgagcacgtgagaaacacgtgccattaccgtcgatgggtctctttc

SEQ ID NO: 625 - DNA, 544 bp, Arabidopsis thaliana
tcgagcggccgcccgggcaggtctctcagagaaacgtcagccacatcaaccaacccaaacatcgaaagagagacacttttctctctctctttctctatctccttccaatctctctagggttttcgttacaacggcgaaaagatgttcggtagaggaccctcgaagaagagcgacaacactaagttctacgagatcttaggtgttcctaagagcgcttcaccagaagatctcaagaaagcttacaaaaaagccgctatcaagaatcatcctgataagggtggagatcccgagaagtttaaggagttagcacaagcttatgaagtgcttagtgacccggagaagcgtgagatttatgaccagtatggagaggatgcactcaaggaaggaatgggtggtggaggaggtggacatgatccatttgatattttctcatccttctttggtggaggcccctttggaggtaattccagccggcaaaggaggcagaggcgtggtgaggatgttgttcatcccttgaaggtatctcttgaggatgtgtacctcg

SEQ ID NO: 626 - DNA, 544 bp, Arabidopsis thaliana
ccacgcgtccgcttcaatttgaattttctcgagaaaaatgtcttgctgtggaggaaactgcggatgtggatctggctgcaagtgcggcaacggttgtggaggttgcaaaatgtaccctgacttgggattctccggcgagacaaccacaactgagacttttgtcttgggcgttgcaccggcgatgaagaatcagtacgaggcttcaggggagagtaacaacgctgagaacgatgcttgcaagtgtggatctgactgcaagtgtgatccttgcacctgcaagtgaagaagcctttttaaataagcagagataatcgagtctctttaattaattaagttattcaataagtaaaccatatataggatggtgtttttaggtttggtttatgtgtaataatggcttcagcttatcttttagccgatcattgtcttttgtgtttgttttgatcatatcttttagatgtctagcaactctgccatgtgatgagtttgtacttccagtggaatgataataatattatagttttaaatctcaaaaaaaaaaaaa

SEQ ID NO: 627 - DNA, 544 bp, Arabidopsis thaliana
ccctttgcctcaaactgttgttccgttgatgaccaaaccgtctttggcaatctcagccgttgccgaccttcgagatcagaattctccaagaaccatctcggaccacttccttcttttcggcgactctcctttgctgatctaagccgttcttcttcggctaggatcaatgaagatcttgcacagactcttggagccgacttagtggattttcagatgtgtgaactcaagatgatcactcagagtttctccgggaactatcttctcggagaaggtgggttcggtaaagtgtataaaggttatgttgatgattatctccgacaaagtctcaaggctcagcctgttgctgtcaagctattggacattgaggggcttcaaggacatcgtgaatggctttctgaggtcatatttcttggacagctaaaacacccgaatttagtcaaacttattggttactgctgcgaagaagaggaacgagtactcatctacgagtttatgccacgtggtagcctagaaaatcacctcttcagacggatatcactatcgt

SEQ ID NO: 628 - DNA, 543 bp, Arabidopsis thaliana
ctttttttttttttttttttttgtaactagagagactgatagaatcaaaccttaaaatctttttactaacaatagaaacttgttcaagatcaaacaagagctttgatagataagcagatgttcttatagatatagaaacaatgaagaggataaagtcttgccgtctgagttatagattctcacagaggcaatgttaaaaatggtttcaggaaccaagagaagatctttagaactagaatcgctggaaaggatcttttacatgaatgcagttcttccacctcttcgagtgtttctgtcatatgcggtgttgaatttgtcgaccatctcgttcatgttgctggaacaatttgtaatcatcgctaggtaagttattagtaatttgtcgttgtactccatcaagaaattatcttgaaatctctctgattccatggcaggcaatcttcttagcaggctagatacttgtctcagaactgagttgtcacaagatttatcacctttctgcattgcagcaagattttggtaaagcactctgattctgctatt

SEQ ID NO: 629 - DNA, 543 bp, Arabidopsis thaliana
tcgatcttgatcttcccggcggagtaaccaaaattccgtaaatggcgtcaaggagaagtgtacggtatgcacagcttccaggagatgaagatgatgaaggctatggaaatggtgttggtgaaaggagagatttcgatcctcggttcgattattcaccgaaagcatttgatagagttccatggaaatctatagcattagctgtgtttcttttgtttcttggttgcttgcttcttcttttgtcgttttttatcttcattggtcacatggaaggagatagctctcaaggttatgcgttacttgttcttgggatccttacttttctccctggtttctacgagacccgaattgcttactactcatggagaggagctgaagggtaccgttttgcagccattccctcttactgaactcaagtaactggagaagtaaagaatattgtgcatagaaaaagttttagagattgtaatccaaaaagtactactatacttaagctgtttgatgaatctactgtgtagaatctcctctagttgagtttagacagat

SEQ ID NO: 630 - DNA, 543 bp, Arabidopsis thaliana
  misc_feature (1)...(543): n = A,T,C or G
ccacgcgtccgcaacttaaacacaaaaaccaacaattatcaatcttcgatgatgcatctcaacaaaaaacagaggttagagaataaccataacaatactgtgaacaaccatttcgaagacttacatgacgatctcatcatctctatcctccgcaaactcgcttcctccgcttcttctccttccgatttcctcaccgttctctccacatgcaagagattgaatcggttaggattacatcctctggttttatctaaagccggtactcaaaccctagccgtcacggcggagaaatggtcagattcttctcataaattcctcaaactctgtgttaatgccggaaacatcgacgcttcgtactctctcggaatgatccgattttactgtctacaaaatccagtgagcggcgcgtcattaatggctaaagcggcgattaaatcacacgcgccggcgctttattcgttatcggtgattcagtttaacggaagcgnnnnnncaaaaaccgataagaatctacgcgccggcgttgctctttgtgcacgctct

SEQ ID NO: 631 - DNA, 543 bp, Arabidopsis thaliana
gtgaaatatccttttcataacataaaataaggttttgcataacaatcataaaagtcatgtcccacgtttttttatttatagagacattagtagacgagagcaaactctaagcgtccctcttatcatcaggacaacaatccacttcaagatgatctttaaccaggaggccagttcatttggcgtcctccaatgagatgaacatgaatgtgatacaccgattgacagccttgaggaccatcattgataacaattctgaaaccctctgctaggccttcttgttttgctacaagcttggcagtgtagagaaggcggcccaagatgtcgatgtgcctttcctcagccttagagaggccagttaggccatccctcacttttggaataaggaggatgtgaacaggaccctggggcgttatgtccctaaagctaagaccttgtcatcctcaaaaaccacggtggatggaatctctttggtgatgatcttgtcaaatatggtgggagaatcggaaggagtggcggcgagagcagcttctttctcggaagcca

SEQ ID NO: 632 - DNA, 543 bp, Arabidopsis thaliana
  misc_feature (1)...(543): n = A,T,C or G
ccacgcgtccgtcttcgagtccaatgttggagcaacattctgcaaatgtgtaaacagagttgtggcaactatattagctggatcactaggcattgctgttcattgggtcgccacacaatcaggaaaagctgaggtttttgtgattggatgctctgtttttctctttgccttcgcagctacttactcgcggtttgtgccgtcattcaaagccagattcgactatggagcaatgatctttatcctcacatttagccttgtctcagtaggcggttaccgagtagataagcttgttgaatnggctcagcaaagagtatcaactattgcaatagnaacatctatttgcattatcattactgtcttcttctgtccgatttgggcaggatctcagcttcaccgtcttattgaacgtaacctcgaaaaacttgctgattcgttagacggctgtgtagcagagtactttaaggagaacgaagtctcaacgaatcgaaatgaagatgaaaacactaacatgaaattgcaaggattcaaatgtgtactcaactc

SEQ ID NO: 633 - DNA, 543 bp, Arabidopsis thaliana
ttttttttttttttttttttaaggtaaatgacgttttatttagagtagtatccacattgtctgaaataaagaaagacgaatcatgttgtatttagggaagttgtaacatacaattatcatttattcttatttttgataatgttatcggtttcatgaacctagcttctagaagggcataggtgggatactctgctcgtgcctgaagaagttctcgggatcaacctttgttttaatcttcaccaatctgtcaaaattgcctttgaagtacttaggtccccagattttagcttcgatgaagttaacctttgcgttgttcttgttctgtccgaagtctagatctctgtagttcacatatgcttgtcttggattgcttgagacataaggcgccatgtacctgtatatctctttgacccagttgatttttctactcgatgtcttgtcattctctagccagtttgcgtaatagagaatcttgaagagggttccgtttctatgcgggaatgggatcgcagattcagggattttcgacatcataccaccgta

SEQ ID NO: 634 - DNA, 543 bp, Arabidopsis thaliana
tccaggttcatcgaagaagatgatcgcaacgcaagaagagatgtctgcagctaaaatagcacttggatctagagatatgtgcgctcatctcttgattccgctcaacaaatgtcgtcaggctgagttttaccttccatggaaatgtgaagacgagcgtcacgtttatgagaagtgtgaatacgagcttgttatggagagaatgcttgcgatgaagaagatccgtgaagaagaagctttggctaaacagaataaactacaaggaaacgctgctgttcctcttatccctaaaactgctaatgcttaggattcgattccttctccaatttgccgattccagattccgggattctctggaactgtgaagatggtggggactctgcttttcaatctttttcttcttgctagtgatgaaaaattgttgctacattttcagatgtgaatgttcaagattctctatctttttttttttttgaactctttttaacttggagtggtttcccaaaaaataagatgcaaaactcatctttttgttggttttctatc

SEQ ID NO: 635 - DNA, 543 bp, Arabidopsis thaliana
ctttttttttttttttttgatttaatgaaattatttgataattattaacaacataacctaaaacttaaccaatgaacaattagaataatctaaaaaccctatacaatgaaatgttaaagacaagtttatgttattcccctttttgtacaagcttccaagtcttatgaacataaaaagcaaacgcaaattttcttgcgtttttgtttccttgatgtcaaacgtagtttcttaccaaccaaaccacataagtcagctagctagctgagatcgatatccactttttccggtacacacctttctttttggttcttaccaagctctgttccaagctgaccctgatcgcctgcaccaaacgcgaatagcttccccgattccgtgagcgcaaatgtatgagcgttccagtatatggagttcgttagacttatctggaccatccgctcgttcacttgttttagcgatgttactaccgttggacttagcacgtttgcatgtcgattaccctgttcatcaaaggatggatggtgaccgagaccggacgcgtgg

SEQ ID NO: 636 - DNA, 543 bp, Arabidopsis thaliana
taaaaggtctgcaaaatggttgctcagggattcactgtggatcttaaaaagccccttgtatttcaggttggtcatcttggagaagattatgaggaatgggttcaccaacctatcgcgaccaaggaaggccctcggttttttcagagtgactttttggagttcttgacacttacagtttggtgggcagttcctgtcatttggttgccagttgtagtctggtgcatatcaaggtcagtaagtatgggatgttcacttccagaaatcgtcccaattgttgtcatgggaatattcatctggacattttttgaatacgttcttcaccggttcgttttccacataaaaacgaagagttactggggaaacactgcacactatcttattcacggatgccatcataagcacccgatggaccaccttcggctcgtctttcctcctactgcaacagcgattttatgctttccgttctggaacattgcgaaggctatctcaactccttcaaccgcacctgcattgtttggtggaggcatgctcggatatgtgatg

SEQ ID NO: 637 - DNA, 543 bp, Arabidopsis thaliana
aattaacaaaccgaaccatttcaatgctgggaacagctgatataaccatctcagctaaaacattctccaagagacaaggagcaccaaagcttgttcctttcttcatcgtctcagctagagccgcaagaacctcgtcatcagcatggccaataatagcaggtccccaagagccaacgtagtcaatatactcatttccatcaatgtcccacatttttgagcctttaacagaatcaatcaaaacaggttgtccaccaacggatttgaatgctcgaacaggggaattcacacctccaggcattagattcttagcagcattgaaagcttcctcagatttctgaagactgaaacttttcttcttctcgtcgacggaaacagacatcttgatgcagcatcggttagaagctggtgaagaagaaactcttttcgagatcttcgaggaacacgaaaaccccaaagcagttcccgatcctgtaagcgtcgccgacatctttgatctgaaactcgctgtctctggcggtcggagacctgcccgggcggccgctc

SEQ ID NO: 638 - DNA, 543 bp, Arabidopsis thaliana
  misc_feature (1)...(543): n = A,T,C or G
aggtactggaggaggtggagaggatacgagaagcttgatgggtcatcggagacgacttcgggtcgaaggaaaggcaaaagggtcaaaatggatccgactcgcaagaaacgtttttggaggatcaagattgtgcctaaactgaggatccttaaaacggcgtcgccgaagaagttcttggtgtggctacgtgattcatatgttaagatgatgatgcggttggctaactcacgggttgttggatcttctggatacggtggatccggattcgggtcaggtcagatgaaggagtacgatgagaaaatgcttgtggagatttacaagtcgatactgatggtgcaggcgcaggggaatctcgtgcaccgcgacacacctaataataatcttaagcttccttcagaaccagcggttgtctctgtcgtatcttctgttgttacttgttaggtannnnnnnacaaanaattatcctttcttctttacgataaatttccaatgttgagaatcaaaattgttgacttgcttgatactatttcgagattgatgata

SEQ ID NO: 639 - DNA, 543 bp, Arabidopsis thaliana
cttttttttttttttttttttactttgcaaataaaagtttatatgtgaaattgataacaaaactgcataaaattctgaagagggtggtaacatccgaaagagcatagaaattaaaataaaacaaggtttcaaaatatcgctaaacaacaaaaccattatcatatgtttcatagcagagaacataaggtatgatgcctagttcattctctgggcagcctccttagcaataaccctctccttagctttggtcttggcttgagacttggatcccattatgccacctccccacttcttcctgtactcctcgtacttgtcattgaagttagccttgatggcctcgaggattttgctgaactcaagcttgtcctcgttcttcacagtggtcaagcacaaggcagcagcagtcttctggtgaacgaccgctccaagacgagattttcccttaacaatgcagtaagggacttccattttcctgcagagtgcaggtaaccagaccaccaactcgatagggtcaacatcgtgtgcaatgaccacaagctgtgc

SEQ ID NO: 640 - DNA, 543 bp, Arabidopsis thaliana
ctttttttttttttgatttgaagttatataaggtttgtgatcgcatcgatgattcaatacattaacaacgggttttatagatttaatcaaatatgatcattacaaaccacactgagaatagttatacgacatagatacagttgctggttaaatagcgaactcagttacggcatatcctggcggtaggcattgtgacacagactggagcatacttcttcttggcagcttctgttcctctctttggctcatcgtctgccattgccaccttagctaaggagcacacagctgcagctgcagctgtgaagacaagatccctcctcatcttcatgctctgttcttgcttcttgttctccaagctggttgtgttttcactcccggaggctttgaccaccgtgaggcttcgtctgctgttgctggagatgtttgccggaaggtttgagacggtggggagaaatgaagatgtcatggtcattgacgccattgcaaatggtaagttggattccccgcgtgtgatctctttatctctctctgtcggacgcgtgg

SEQ ID NO: 641 - DNA, 543 bp, Arabidopsis thaliana
gaaaaaaccccatcaacatgaactctatgtcttcaagtcttgcaagaaccggtcaatgggttttttctcaagatattccgaccgatgttgttgttgaagtcggagaagccaatttctctcttcataagttcatgttagtggctaagagtaactacataaggaagctaataatggaatccaaagatagcgacgtgacaagaatcaatctctcggatatacccggaggtcctgagatatttgagaaagctgccaagttctgttacggtgttaacttcgagatcaccgttcagaacgtggcggctcttcattgcgcagccgagtttcttcagatgaccgataagtactgcgacaacaaccttgctggtcggacacaagacttcctttctcaagtagctctctctagcctctctggagctatcgttgtcctcaagtcttgcgagattctccttcctatttctcgtgatcttggtattgtccgccgttgtgtcgacgtcgtcggtgctaaggcttgcaacgaggcaatgtttccatgtcgaacaccac

SEQ ID NO: 642 - DNA, 543 bp, Arabidopsis thaliana
cgcatttcaaattgcatcagagagctgcacacgtttattccgaagcccggagggttcatggtttcaaggacacagttaattcaaacttaagtgacgaagagaagttaaagaaacttggtgatctcatgaatgaaagccattacagctgcagtgtcctatacgagtgcagttgccccgagctagaagaacttgttcaagtttgcaaggagaatggagcacttggagcaagactgaccggagctggatggggcggttgcgctgtggccttggtcaaggaatttgacgttactcaattcattccagcagtcaaggagaagtactacaaaaagagagtagagaaaggagtggtaaaaaaagaagatatggagctttacctctttgcctccaagccttcaagtggtgctgccatcttcaacctctaaacacatctctctccctccttattaattttactcaaatccgaattgtttgcagcaattgtgcccattgaattcccagcttcatttttaataaatatttttgaataatatgtaggagttgacg

SEQ ID NO: 643 - DNA, 543 bp, Arabidopsis thaliana
gaagaacaaaggtccattgacggagacatactcgagtcaatcctctcctatttaccactcctagacctcgattcagctagccaagtctccaaatcatggaaccgcgccgtcttttactccctccgccgccttaaaaccatgccctggttgttcgtctacaaccagagaaattctccgccgtacaccatggcgacgatggcgatggcttatgatcccaagtccgaggcctggatcgagctcaacaccgcatcatctcccgtcgaacacgtctccgttgctcgatcctctcactccacgttgctctacgctttatctccggcgagattctctttctcaaccgacgcgtttcatctgacttggcaacacgtggcaccgccgagagtttggaggatcgatccaatcgtggctgtagtcggacggagcctgattatagccggaggtgtgtgcgatttcgaggaggatagattcgccgtggagctgttcgacatcgaatccggagacggagcgtgggagagatgcgaatcgatgccggattttctctac

SEQ ID NO: 644 - DNA, 543 bp, Arabidopsis thaliana
cttttttttttttttttttagagaataagttcgatttgttgtttgaaagaaaagagagatgaaagaaacggaaacatagtcgatcaattatttatcagaggctgtacatggccccaaaacataaaccaccaaagtactagatgaaacgatacatgaacttggttcagtaaccataagagagagagacaaggtttagaaaccaccacggagacggaggaccaagtgaagagtagactccttctggatgttgtagtcggccaaagtacgtccatcctcaagctgctttccagcgaagatgagacgctgctggtccggaggaatgccttccttgtcctggatcttagccttcacgttatcaatggtgtcggagctctcaacttcaagagtgatggtctttccggtcaaagtctttacgaagatctgcatacctccacgcagacgcaagaccaaatgaagcgtagactccttctggatgttgtaatccgccaaagttctgccgtcctcaagttgctttccggcgaagatcaacctctgctggtccgg

SEQ ID NO: 645 - DNA, 542 bp, Arabidopsis thaliana
  misc_feature (1)...(542): n = A,T,C or G
atcgagcgaacaaacatattataaagatatgtaaaaatcaaagtgcggtttttttttggatgtggtctcgctcttttctctctaagaagaagcagcagcagctggtgctttctcttcagcagcagtttcgaatgtctctccaacaagctctgggacatcgtcatcatcctcttcttgtatggttgctgaggcggcattaccttcaccagaagcctgtttctggaactgttctgctagcttcttcaggttgtccatgttgtctggtccaagttggctgatgatctgaggaaggatatcttgcaattttttggtcngnnnagaaccgctaacaacccatgtgtttgcagcaattgaagcttgaaccttagggttgatgaactgaataacaacatcatccttaaagatgttaacttcttcaatagcgggaatggagttaactccaattctcttaagagtgctttgaagcctcttgtcatcagttgtattggtcttgtgcacagccttcttctttcttctgacagtaccctttccgccagtgcgga

SEQ ID NO: 646 - DNA, 542 bp, Arabidopsis thaliana
aaacaaaatagggtaaaatgaatagacaaaaatcggggacatgtcaaaagggtcgtcgtcgtcctcaaggcaggcataggcatgtgcatgaatgcaacacaaaaccaaaaaacacaaatcctcacacgttacaggtagccacaaaccacacaacttactaagcaattttatattcatctgtttccacatgtccccaacagtatggacacctttccccggctgctaccttactcaccagctttctcacccttggtctctggttcggtttcaggttttggatcaggtatagcatcaggttcggattccagttcagctttggggattgattcagtttccaatgcagtactggggtttgattcaggttccagttcagttgtggggttcagttcaggttccgattcagccatggcgtttgtttcgattttaggagattctgtcttatcatgacggaatttaacaacaatgcacgtgatgttgtctgcactgccacggctgaaggcagtgtcagttaacttgcgggcagctgcttcgggctcttcctc

SEQ ID NO: 647 - DNA, 542 bp, Arabidopsis thaliana
ctttccgatatttttctctcctgtcgcaaatagcttctggttatctctagtagtcgctttctttgtcagctcggttaaaagagctttcgtctgcgagttgaatgttgatggatcactcacatttttgacgttgtacaaatagaacctgttctcgaaatctatcttcccgaagaaattggtcgaggaatactttacaagacagttgtcataccatactattcccgccttgttgttcggacatctctgacgtagctcggggatggcagtctcaagacaagagcggcagtcagaggaggaggcatcaccgcggcaaagggccaaaccgttgacgttgtttggagtgttgccagtggaggaggcggcaaaaccggtggatggaactttgtaagagagctgactaaagagattgttgagatttgactcgtagagactttttgaggtaaagcttccttcgatgtctgagcacttgtggaagagaaacgcattgttctggctttgagacaaaacggtatgtatagagagaatttgtatggctatggcca

SEQ ID NO: 648 - DNA, 542 bp, Arabidopsis thaliana
  misc_feature (1)...(542): n = A,T,C or G
agcacatagtagaccagaaaaaatcatcaaatccatctcccactcttctagcatcttgaagcttaaatctcagccgtccgatcatgccgatcagaaacatcgccattggccgtccagatgaagccacccgtcccgatgccttaaaggcggcgttggctgagttcatttcaactttgatctttgtcgtcgccggttcaggctctggcatggctttcaacaagctcactgaaaacggagccaccactccttctggtctcgtagctgctgcagtggctcatgcctttggactcttcgtcgctgtctcagttggtgccaacatctctggtggacacgttaaccctgccgtcactttcggtgctttcattggtggtaacatcactctcctccgtggtatcctctactggattgctcagcttctcggctccgtcgtcgcttgcctcatccttaaattcgccnncggtggcttggctgtgccggcttttggtctctctgctggagtaggagtgttgaacgctttcgttttcgagatcgtgatgacattc

SEQ ID NO: 649 - DNA, 542 bp, Arabidopsis thaliana
ctttttttttttttttgatgaaaattcctttcaaggtttgtatatgaaaagcttataattagtattctgttaatgaagaaagagcaaagaagacccccaaaatacaaaccagatttagaataaatttttataaggaaaaacagactccacaaagcatttgaaaagacacaccaaatcactactcatcaccttaataaaacatatacatcccaactgaagaaaagcctcgacaaaaagactctctttaagaacacatttatacggtatggcaacaactgaaaccgaacccaatcttccattgttgctattgcacagaagaatcaggcttcctggactggtacagctgctgctgttgatgacctcaacaatggttgaagagcttttaccacaatgctcatgtttggcctaaactctgattcatattgcacacacaatgctgctactgcagcgagctttgcaacagctttaggaggatattctccctttagttttggatcaacacattgcttcactttgtcttcacttagccttggagtagccca

SEQ ID NO: 650 - DNA, 542 bp, Arabidopsis thaliana
  misc_feature (1)...(542): n = A,T,C or G
attgcacaaatgtgaatgaacccaacaataacacaaaagaggaggatgatgatgacataaataatactgaaaacacaagtacataagccaagaaaagaaaatcactggactcgtttatttgggcaaaaggaaaagaaaagaagtgaagaaagagagagggtcactactgcttctggaggtcaataaccttagcccaagcaggcctggcagagatcttcttaatccactcgctaaccttagggcgagagtcaaagagcaccttggagtcagtacccaacaagtaatggatggctgggaggtggtgaagatcagcaagagtgaaggaatcaccagccaagaactcagatttggcgagcctagcctcgtagacatccaagactttctggagcttaccttcgagctcttggacagcggcagggtcagtggtcatgccgaacatgcctttaaagacacgctcgaaggcaagcttagaggcgttagggnnaaactgttgaccttcaacttgaagccatacgttagtggttgccttgactttcttgcag

SEQ ID NO: 651 - DNA, 542 bp, Arabidopsis thaliana
tttttttggtagaatatgtaaatgacggtttattggtaattaactacgtcataccagctgaggaattatattcagaaaagttaaaacataaaatgatattccagtagtttacatttcttgcattacattttgaagatatatatagattcggtgtatccaaatctttattgaggaaacaacaaatttcagtacaggatttaaaccaagacactagggttcatggtagcaaaggcgagcaactctgggttctgctcgaaggacgacatgttctcttcaggcagtgtgacgaacgcttcaattccttgtccgtccttagaatctatcaacatggccaagttgcctaacacgggagacacattcccaacaacccaaaccggagaatcccatccaaagttggcctcgtaaagaggtagcttacaccagctactcacggtatagggttcatgagtctcatagctcaaccgagaatagttggtgagcatcagatttgctagtttagaaccgatcatagaagatgagtcagatgacccaccctcgtctag

SEQ ID NO: 652 - DNA, 542 bp, Arabidopsis thaliana
agcggccgcccgggcaggtacagtatgattactgatgctgaagagaaaggacttataacacctggaaagagtgttcttgtggaatctacgagtgggaacacagggattggccttgcattcattgctgcttcaaaaggctataaacttatcttgacgatgcctgcgtccatgagtttggaaaggcgggttcttttgagggcatttggagctgagcttgtgttaactgaacctgcaaaaggtatgactggagcaattcagaaggctgaagaaatcttgaaaaaaactcccaattcctacatgctccaacagtttgacaaccctgccaatcccaagattcattatgagacgactggtcctgagatttgggaagatacaagaggcaaaatcgatatattggttgcggggattggaactggtggaactatcactggtgttggtcgattcattaaagaaagaaaacctgaattgaaggttattggtgtcgaacccacggaaagtgctatactttctggtggaaaacccggacctcacaagattcaagg

SEQ ID NO: 653 - DNA, 542 bp, Arabidopsis thaliana
ctcattaaacaataaacacacacacccaaaaaaaaaaatcacgcatcaagaagggaacaataagcacactagtctaaaagagttatacacaacacacaaaagcacttagatcaaacgttttcttttaagagattgagaatcttcgtctccttggcttagtaatgtcaacacctccaagatcttcatctatgtgcgaagtatccttagacccatttttaaacggatttaacttcccaagtttcttggaaacagaagagaagaaagtatgtttgctcttcttactactcaccaacgacgacgaattcgaagaagaagctcctgcaccgttcttattcttctgcatatccgaaacatacattttcatcttcatcagctcacttctcaacgcttcgttttctttagctaacgtagtatcagcttgcagttggctacgtgtctttaaagcttcagggagaacaactactgctctttcttcttgttctgcgactccacttcttagctttaactgatcgtagtaaagagcgtgaagaacaatgtttact

SEQ ID NO: 654 - DNA, 542 bp, Arabidopsis thaliana
ggtacatacaatgtgttggtgacgaccaataatcataattaactaatagagcattaaaaaaacaaagaatcaaccgtcttaattaagcaaagcaaagcaaagctgctatagacaatgagagattcagctaattatgtgatggcaatatgacaaaacagtggctgcaatagctaatgttgtcatccaataggactgagaaaaggtgttgccaatggaggaacttcggtctgagtttgtagatcctcctctagaacgagtcaagcaagcaatgggattgacatgttctccacatcgagcaggcaacatttgagcatcattgacatcgatgccagctcgctcggcttgagaactccaacggttactaatcatacggcacaagcactctggattgttccttatcactgatttgagaggattacaacaaacttgaggtacttccttggtcccattcaggtaatttaggcatggagcaagttggtttagacacgaaacgctctgcccatttatccgcatccccgagctagctgcaactagaagaagta

SEQ ID NO: 655 - DNA, 542 bp, Arabidopsis thaliana
ttttttttttttgagaaagagagattcattcacttgtttaaacaaatcacaatacaaaggagacaaagtaaaattacactaagggccaaagtttctgagttttcaaagaaacttaagccacacctttccacttcttccccacctacttacatggagaaaaagacaccaaacttttaccattacataactttaaccatccctaaaaactacccaagaaggcggatttgagtgagtgtgtgtagaaagaaacaaggtgaattcacaagacaagataactcgagagacgagccactactacttggagcctagcttatggacacttctggtttttaccagggcctccatagtaaaagtaatgaccccaatcatcattgcttccggtttgaacatcataacagttagactgttcagtgaatgttccaagtcctttaggtgccttgaggttgtttgacccatcaaccacctgaatgttcctgaagtaacttgctttgctaaagccttcttctggaaatttaccactgcccatttgtgttgaagtgtgc

SEQ ID NO: 656 - DNA, 542 bp, Arabidopsis thaliana
  misc_feature (1)...(542): n = A,T,C or G
ccacgcgtccgcagttgaactaatcttagaagtgagaacaccgttgcttccataattcccggtgaatcatttgttgttcgatttctccggcggagatggtgagtccgacgagagacgctatccaatcttacatgagcatcactggcgcgtccgagtcactcgcgattcagagacttgaggaacatggcaataatctccctgaagcgatcaatgcccactttagagatgtcgaangnngcatttatgatgactcaagcttagacactcgttcagactacaatgttgtggaagataacaatcacgttcgtggtagcgagactaggccagttaacgagtctaggccagtccctggcgcacttccatctatactctcggctgctcgggcttttagaccgtctttgcttctagatcccaattacagacggaatatccttaggcagctcagtggctctgctctctctggaagtccttctccatcatctcacactggagaagtcactgggttccctgctcactctacctggggaaatgatcacactcgt

SEQ ID NO: 657 - DNA, 542 bp, Arabidopsis thaliana
cggccgctttttttaaaacaacctatgatgtaataatctaaaataaataacataacctgtttaaaactttaagcttttatcaatgaacaatctgaccattctcaacacctaaaccatacaaaacaccagaatacttctccattgaaccaatgaagaaattctcctgcagcttcctgaatgtacacgacgttaacaagctatccgatccggcctggtgacaaatcccaactctctcaacatcaagcagctccgccaatttattcagacctccatgaagactattacagaacttcatcaagtgtttgatatcataaaccctcgggaaatacacactgatcatctcgaagaaccctgtttgcgtctcgggaagattctgacaagtcaatagcttcaacaagtaaccgaaatcgtatccgctgtggaatgtaacccaatgaacgttttcattcaacacaatccctgaagacatcaaaagctcagcgaaccgcttcgaatcgataccgaattcgttgtttttcacgaaatcgatgcctgattgacga

SEQ ID NO: 658 - DNA, 541 bp, Arabidopsis thaliana
tttttttttttttttttttttttttttttttttttttttttttttttattgaaactctcttattcatatcatagatgtaactgagcccaaatcatacacaggtgtcatcattttacatttagttatatttcgctgctatttcttgtagcagttgagaaagttcatgaggcttagtgagcatagccatgtgaccagcttcttcaatccgcttaacttcgtgaggctcgtagttactaatcatccacttctgaatctcctctggaaccacattgtcgccttcacagacaataaacactctcttcccagatccatacctctcctttgttatcagatcttcacctcccatttccttagtgtataaccagcttggtttcatcaacgccatggctaattctagatcctctaactggcaattactatatgccttctccttcaagaaactagtaccgaacaaaactgaacttggtgggtgttctaatccttcctcgaatgtaaactcacagtccatagcgaaaccctctggtagtctcgtaaaatactc

SEQ ID NO: 659 - DNA, 541 bp, Arabidopsis thaliana
gcccgggcaggtggcaatgttacacttgagacagtacacaagatcggacagagtggagttacattcattagcagtggagctcttacgcattcggtgaaagcactagacatatctctgaagatcgatacagagttggctctcgaggtgggaagaaggaccaaacgagcatagagaacatcgtcttcctcgtatacttactttctttttattttccgggaaacatgtaatcaataaggtgagaggcaaacgaatgaatctgcctataaaatgactgtttcttctacaatgtaataatagtaaaactcttgagtacaatagagtggagacatggatgaatatctgaataagctttctctcaaactttctgcgttttttatgtacatagaatttgcagaaacgttgggaagcattctctaatacatatgtttattggttcaagctacagtgatctcgctccctcctcctctttccgccatgaaactcactcgtttcaaacgggatttgactcctcttgtggcggtggtggtggcggtggcggtgg

SEQ ID NO: 660 - DNA, 541 bp, Arabidopsis thaliana
cggattaatgctgcaaagctagacttctctgagatattggctgatgaaattgaagcagaactgaaagaggctgctgtgatatctatgggaactgaagtcagtgaccttgatttattgcacatccgagaactctgtgaccaggttctttctcttgccgagtacagagctcagctttatgactacttgaagagcagaatgaacacaattgcaccaaatctaactgcccttgtcggggagctagtcggtgctcgcttaatatctcacggtggtagtttgttgaacctcgcaaagcaacctggaagcacggttcagattcttggagctgaaaaagccttatttagagcccttaagaccaaacacgctactccaaagtatggtttaattttccatgcatctgttgttggccaagctgcaccgaagaacaagggtaaaatttcacggtcactagctgcaaaatctgttcttgctatccgttgtgatgctcttggtgactcccaagacaacactatgggagttgaaaaccgtttaaagcttgaagcac

SEQ ID NO: 661 - DNA, 541 bp, Arabidopsis thaliana
agaattagtggagataaacttgacgcgtcccttcttcattctccgtcttctttacgtcaccggaaaacgaatctcattgcctgagattcttcatcggaattaaatctccggaggaattaatcacgtctcacattttttcaccatgtcgagtttggaggagccgctaagctttgacaagttgccaagtatgagcactatggataggattcagagattttcttccggtgcttgtcgccccagggatgatgtcggtatgggacaccgttggattgaaggaagagattgcactacctctaacagttgcattgatgatgataaaagctttgctaaagagtcattcccgtggagaaggcatactcggaaattatctgaaggagagcatatgttgaggaatatttcgtttgctggaaggacttctactgtttctgggactttaagggaatccaaaagttttaaggagcagaagtatagcacatttagcaatgagaatggcacgtcgcatataagtaataagatctctaaaggtataccaaagtttgtg

SEQ ID NO: 662 - DNA, 541 bp, Arabidopsis thaliana
ccacgcgtccgaaaaagctcaatggatggggaatattcggatctaagtacgaggatgctgctgatctgctcgaaaaagcagctaattcctataagctcgccaaatcatgggatcaagctggaaaagcttatctaaaacttgccgactgtcacttaaagtcagatagcaaacatgatgctgctaacgcctatgctgaggctgctaaatgctacaagaaagttgacactaatgaggctgcgtcttgcctagagcgagcggtgaatatattttgtgagataggaaggctcaacatggctgcaagatattacaaggaaattgctgagtattatgaatctgatcagaagttcgagcaggctattgcttactttgaaaaggcagctgaattctttcagaatgaagaagtgaccacttctgcaaaccagtgcaatctaaaggttgcgcaatatgccgcccagctggagcagtatgagaaggcaatcaagatttatgaagacatagcacgccattcactcaacaataacttgctcaagtatggagttaa

SEQ ID NO: 663 - DNA, 541 bp, Arabidopsis thaliana
ccacgcgtccgagaagaggacttcattttcgcaagaatggggaggcttaagcaatgttggtcaagtctgctagtattggcagtgttggtgatcggaactggagccgttcccatcacttatctccaaagcgccgtcgctaaaggagccgtgtgtttggatgggagtgcaccagcttaccattttgacaaagggtttggttcgggtgttaacaattggatcgtccacatggagggaggaggatggtgtaccgacgttgcttcatgtaatgaacgtaagggtacaatgaagggttcttccaaattcatgaacaaagactttggattttccggtatcttgggtggcaagcaaagcactaacccagatttctacaattggaacagaatcaaagtacgatattgtgacggatcatcctttaccggcaatgtagaagccgttaatccggcaaacaagctgttcttccgcggtgcccgagtttggcgtgcggtggttgatgatcttatggctaaaggaatgaaaaacgctcaaaacgctatactctccg

SEQ ID NO: 664 - DNA, 541 bp, Arabidopsis thaliana
  misc_feature (1)...(541): n = A,T,C or G
ttcaattctcaaccgtataaaataaaacaacgaatatgaatacaacacatatactgagccaatcaatgtttctgtagctcttattaatttacattcacaccacttatttgggaagtaatctggtagaattcttgcttggcttctatagcttcacaaaacttcaaaagattacagatggtcttgatatccctttgcatatgtacatatatatcctctttatgcagaagaatcctcttttggtttgattatcacaacaggacaatgggcgtggttggtgcagtagttgcttacacttcccagaaacattctcttaatgcggccataagcccgggagcccatgacaagaagatcagcatgcaaattctctacagcttcgcagattttatacttgggatnnccaataaccacttgtgttttcacattcacagatttttcagcacaaatttgactagcgtgttcgngnnnggtgtcggtgatccgcttctggtgttgctcgattgcagcagtgaaagcaggaacctcaagaccactgggaccaccg

SEQ ID NO: 665 - DNA, 541 bp, Arabidopsis thaliana
cagacttgtgcttggtcaagaagaagaggatgaagatgaagcagaggcggcttcatggttgttgcctaattcagggaaaaacagtggtaacaacaatggcttctcgattggggatgagtttctgaaccttgttgattatagttcgagtgataagcaattcacagatcaatccaatcagtatcaactagactgcaacgtacctcagaggagctatggggaagatggagttgttccacttcaaattgaagtatcaaagggcatgtaccaagagcaacagaactttcagctgagtatcaactgtggctcctggggagctcttcgaagctccaatggttccctcagtcatatggtgaatgtttcatctatggacctgggagttgtgccggagtcaacaacgagtgacgcaacagtatcaaacccaagatcgcccaaagcggtaacagaccaaccaccttaccctccagctcagatgctcagtccaagggacagagaagctagagtcctgagatacagagagaagaagaagatgaggaaatttgag

SEQ ID NO: 666 - DNA, 541 bp, Arabidopsis thaliana
tgatacaagtcgcattgaggatgctcactggcatcttaggaagtttgtcagaatgcagaattctactaagcctagtgaaaagaaatctagttctgagggtgccgatggagtacatggatcgaaggagccatctgtttctctctccaatggcgaggcaaaggcagatagtgcagaaactaaagacttgtctcagattgtgtcgtttcagaaagagaattttgttcaaacccgaaatcttgacgacaatcgttatgatacaattctatgtttgagtgtgacaaaatgggttcatttgaactggggtgatgatggtttaatcaccttattttcaaagatttggcgtcttcttcaaccgggtggtatctttgtaatggaacctcagccttggaaatcttatgaaaacaatcgtcgtgtctcagagacaactgcaatgaattaccgaacgattgttttacgaccagaccgtttccaagaaattcttcttgataagattgggtttagaacagtggaagatcttacatcaagcttgtccggtgcaagc

SEQ ID NO: 667 - DNA, 541 bp, Arabidopsis thaliana
tcgtctcctggaaaacattagggagcctctcagatcctcaagaaaaccctaaatcaaaagtcgagatcgatggcgtccttcgctcgccgtgccatgagcttagctcagatcccatctgctcgtatttcctctggagccgcttctattggtcagcgtcgttgcctcgccggcgccgctgatcaccatggatctaccaaggttgacttctggaaacagcccacgaacccaggaaactggaaagaggagcattttgtgcttatttctctgtctggctggggcttacttttctacagtggatacaagctcgccactgggggaaaaaaagagacgcctgtggagagtacacaatgagtttcattgtcaccaggaagaccttttatggagagacctctcattctcatgcactttgttttcccttttagcagattgtgactggtcttgtgtttcattttgaaaataatttgcatcacttttgagatctgatgatgtctgcaatggataaattcttgacagttttgtgtttcataatatcctatgtttg

SEQ ID NO: 668 - DNA, 541 bp, Arabidopsis thaliana
ccacgcgtccggaagtataagccaagcaacgaatctggattcaacacgttatttgatgatgactggctttttggtaacaatcagcaaaagaatgttgttaccactaataaagccgctatcaagaacgatgcagagatgatcatgaagttgctgcagagatcatgtggagattccttgtttcctagctaaggcccagttttcgcctcaattcggaatatttgtattaccatatacagttccgttctaactgtctctgtattgttttctcatccctcgatcggatttagccttagcctgtgatctattcgggtatgtatatttcatatcctatcatgaatatctctgttaactcgtaatctgtataattttttgtcgtacaagagtttcctttttgtagatttccttttccttgtagtattggttatctacttatcttgtagtctcatattcttatcatgaatatctctatttactcatatttgtatataatttgttgtacaagtgttccttttttagatttcctttttccttgtaaaaaaaa

SEQ ID NO: 669 - DNA, 541 bp, Arabidopsis thaliana
ccacgcgtccgtaacaaaccaacttcagcgacaagataacaaaacgctttcacacgatcggataaaatggcggagaagagctttaagtacatcatcctcggcggcggcgtctctgccggatacgcagctaaggagtttgccaatcaaggggttcaaccaggagaattggctgttatctcgaaagaggcggtggctccatatgaacgccctgcacttagcaaggggtatttgtttcctgaaggggctgctagacttccaggtttccattgctgtgttggtagtggtggagaaaaactgcttcctgaatcctacaagcagaaaggaattgagttgatactaagcacagaaatagtgaaagctgatctctctgccaagagtcttgtcagtgcaactggggatgtcttcaagtatcagacgctcataattgcaactggttctactgttctcagattgactgattttggagtaaaaggtgcagactctaagaatatcctctatctgagagagattgatgatgccgacaaattggttgaagcaatta

SEQ ID NO: 670 - DNA, 541 bp, Arabidopsis thaliana
  misc_feature (1)...(541): n = A,T,C or G
gagagaaagatgccggtgcacgatgagcaagagcatgaggtgtacggtggagagatcccagaagaggaagaaggtgagatggatacggaagagtacgaagaacacggcggagaagaaggtgccgccgccggagatgaggagcttgaacctggctctagctctagggacttggaggatatgaagaaacgaattaaggagattgaggaagaagctggagctttgcgtgaaatgcaagccaaggctgagaaagatatgggtgctagtcaagacccttcaggtggtgttagtgcggctgagaaggaagaagtggattcgcgttcaatatatgttggcaatgtggactatgcatgtactccagnnnaagtccagtagcattttcaatcatgtgggacagtgaatagggttacaattctgacagataagnnnngtcaacctaaaggttttgcgtatgtcgaatttgtggaagtagaagctgttcagaattcgcttattttgaacgagtcagaactacatggtcgtcagataaaggtatctgcaaaga

SEQ ID NO: 671 - DNA, 541 bp, Arabidopsis thaliana
ttttttttgaagaaacaaataacacttttatataatacattttttgtttacaagtacaatcttacacttgaaaatcaaaacgtaaccatcgaccacaaaatgctgtagcaagcttttatttaaaacaagtgattattaattaacgaattcataaatgaaaaacaaagctcacatttgtgtttttttaaatcttagttgatggcggaacaaacccgacgaatctccccatctgatccagtcttaacttctatgagactcattttgaccatcgacttcccgaactcggttccgaacctcaaggatggtcggcgtaatcctaataaacgttcaatgatggctcgggtctcgggatccttccataggactagatcggattggagaaccacgcgacttgacgtcaccttccttaggaacgatgtgtcaaacttgtcaacacttccctcgtctaactccactcgggtgcctccattttgagggcactgagccagaatcagcggcacaaaactcgggtcgattgatgggtcaggttgtccggacgcgt

SEQ ID NO: 672 - DNA, 541 bp, Arabidopsis thaliana
ccacgcgtccgaaaagcgttgggcgagaagaagatgacgtgcttctcttctgctactcctcatcgccatcatcttctactttcttctccatctacttccaaatccctgcttcgatttccctcatcttatctgaaacctagccccagtcttctcttccatggctcatctcgctctctcctctcctgttcagacggcagcaacaaccgtcctcctccctccggtgacaccgtcccaaataacttctgtatcattgagggatcagagacagttcaagactttgtgcagatgcagcttcaggaaatccaagataacataaggagtagacgcaataagatatttctcctcatggaggaagtgaggaggttacgtgtgcagcaacgtatcaagagtgttaaagccatcaatgaggacagtgagctcgaggctaccgagatgcctgagatcacatcttctattcctttcctccctaatgtgacaccaaagactttgaaacaactctattcgaccagcgttgcattgatatcgggaattatcttctttg

SEQ ID NO: 673 - DNA, 541 bp, Arabidopsis thaliana
ccacgcgtccgaattatcattatctcaaacacaacaaggatagatcatcctcataggcgatgttgtttagtggttcagcgatcccattaagcagcttctgctctcttccggagaaaccccacactcttcctatgaaactctctcccgctgcaatccgatcttcatcctcatctgccccggggtcgttgaacttcgatctgaggacgtattggacgactctgatcaccgagatcaaccagaagctggatgaggccataccggtcaagcaccctgcggggatctacgaggctatgagatactctgtactcgcacaaggcgccaagcgtgcccctcctgtgatgtgtgtggcggcctgcgagctcttcggtggcgatcgcctcgccgctttccccaccgcctgtgccctagaaatggtgcacgcggcttcgttgatacacgacgacctcccctgtatggacgacgatcctgtgcgcagaggaaagccatctaaccacactgtctacggctctggcatggccattctcgccggtgacgccctctt

SEQ ID NO: 674 - DNA, 540 bp, Arabidopsis thaliana
ttttttttttttttttttttttttttttactatatgttgcgttgcttctcacataatacagtaacaaaaaaggttccagtactttaacttcataaaacgttatacattacaaattataacatcggctcatgctatctatacttattcacataacggtgcaggcgttagggttctcgtcgctaaagagggacatgagcttatcgtcagtacttcccggctgcgcctgagcctgctccgacttcctcacaaaacccggcggggctctcttgtcgtaagctccggcggcatatggataagccaccattgtgtatggaacatacggccacagctcagctttctttttcccagtgctctgcactgtcttcagcactttcttgggatcaacgtagccactcaccgttactttgtgcatctttctgttcacttccactgattttgctcctttgatggaggaaacagcgttcttgattttgcgttcgcatccgtcacagtcgatcttcaccttaatattcaccgtctgcatgactttacgtttcttcc

SEQ ID NO: 675 - DNA, 540 bp, Arabidopsis thaliana
  misc_feature (1)...(540): n = A,T,C or G
aaacaagaaaaaggaggatggaatggaaaaaagaaaagagttggagaggaggtcggcacaacaaagatggtatgtctcctaaatcatcctccgaccaaaacaccaacacaaaactaattaaattaaatttgggggctatatcacgtcatcaaccgcgtaaaagtacaaagccgacgagatctagtggagaagcttttacaaccgaagcttgatgatgcaaagcaagaagaagaacaacacacactcaacgaatctgccttttcccccggcggaggaaatggacatgtaatccggtgatgggttacccgtgactggctgatagatgccaccaccgctggaagagccaccagtgttaccgccaccgccactgctactaccancagtggagttgctgctaccactaccactactatgagtggaagaggtcttgatcccaagtgagtaaaccggagttccgtcagggttgaagagaccgtagttcctctcggaggttggtccaggcttcatgttctcgttaaagagagcaaagacgaagatggt

SEQ ID NO: 676 - DNA, 540 bp, Arabidopsis thaliana
  misc_feature (1)...(540): n = A,T,C or G
agcggccgcccgggcaggtaccttatggctccttggactctatgactcctcaagaatctcgaaaacaagctcgttacgtcttccagatcggctacactcnnnaaaacgcctccacatttgtcacacaccttacatttctgctactaagcaatccctttgatggcatccttatcctcgtcccatcggggtttacagaagagcgttcgaggcaccaagtgaggagttcttcaccacaaacatcgccttcatataatggaagaacagaaccatcttctccaatgctctccatctcacctctcactatgaataccattttctcaactagtcctccacggtgcaacactgtgctactccctatgtatgtcctctgtttcagcctctcacggattgcatctaagattggttcatccatcaacgaaaatattctcaccttcttgagaaatttgaagaggtgtcgtcttatatctctttgaagatcatcaggcatattctcaaaaagcaattcttcgttaacgcctctagtagcagcccagttaaacc

SEQ ID NO: 677 - DNA, 540 bp, Arabidopsis thaliana
gagggtgttagtgcaactatgcataagttaaggccttatttgttaatgatctttttgcaatttggagcagcaggaacatatattgttattatggccactcttaaccaaggccagaaccgttacgtcgtaattgtgtatcgtaatcttgtggctgctcttgtccttgcaccttttgcactcatctttgaaaggaaagtgaggccgaagatgacactatcggttttgtggaaaataatggcacttggtttcttagagccagtcttggatcagggttttggttacttggggatgaacatgacatcagcaacatatacatctgcgatcatgaacattcttccttctgtcacatttataatagcttggattttaagaatggagaaagttaacatagcggaggtacgaagcaaagcaaagatcattgggacattggtgggtcttggaggggcactagtaatgacattgtacaaaggtccgcttattccttttaccgtggtctaacccgaatatggatcaacaaaacggacatacaaatagttcaca

SEQ ID NO: 678 - DNA, 540 bp, Arabidopsis thaliana
ctagatcatacagatttgaagagaaattatttcatggattacatttgagagtaaacaaataagtccactacggaatcattaaaattctcttaatatatacattgcaaccggttcaattcaactcaacccactctgcaggctcctaaggactttgaaatccctcaagcttaaaaagaagaactaaagagttgacctgagaacaatggcacggatctaaatgagtttatgtatgccaaccagacggcgctttaatctctccaagcctccttctctcttattggttagaggaatactgacatctctgtagaagggataaagggaagaatcctatcaccatagagttcgtgcagtttcaccaatagccgtccggaatcaagatcatctttccatatctgatcaaggattgctttcatggtaatagcccgactcctgccgctttctttcacctttccatttctgctttcagattcgttagcatcagaggcttgttctgatgaggatggctgaacagagttttgtggcggattgtcattttccact

SEQ ID NO: 679 - DNA, 540 bp, Arabidopsis thaliana
cttttttttttttttttttttttttttttttttttttttttttttttttttttttttaaccaagaagataacacgatcttattgtttcctattatcatctgaataagtgatgtacaaggaagatgcttacttggtgaagtttatacaggtaatttgatctctttgaagtcttgatatatatacagtatagagtagtagataatcaccaaagcctcttcatatatggaaactacttgaaacgtgaacccttcttgcctttgcctttacccgtcccatctgtgactgtaacccagaagaagagaaacatccaaaagaacactgcgaggaaaatctttacgcggtcttgaacccttgtcacagctcccacaagaccttctagctgagtggtgtcctcaggcggaggcggatcagggcctggaggagaaggaggaccaccagcgacggcgaggcggcgtaaacggcggggactcgctagtaggacggtgtttcgacggtgaaggtgatacggcggtgagaacggcgagagaattgagtagtggt

SEQ ID NO: 680 - DNA, 540 bp, Arabidopsis thaliana
ccacgcgtccggtgaaagaagatgaagattgaggaggatctaggtttcatcaacatactcaaacgagcaacaaagcttctatgtggtaacatcaatcttgttctcttcctcttcctttgctctctccccctcttttgtttcttgatcttcttcgagctttcactccaaaccactgtctcactcgcttctcaatacctcgttcgacaactcactaattgggattactactacgttcctcaagatgcttccgtcttggagaatctgattccattgcttatccagacatttctactctacttgttcccgtacggcctcatagacctcttcaccaccaccacaatagtctctgcatcttggactgttcacacgtcggaggaggaaccgttaaggttcggtcaattggttcggagaacggtagagatatgtcaaaacagacttgaaggttgtctgatcacctctctgtacgtccttctcttgtcaacccctgttttctttggcttcttatttgtagcaacgaactatttccacatcatttctctg

SEQ ID NO: 681 - DNA, 540 bp, Arabidopsis thaliana
ctttttttttttttttttaacaaaagaacatgattttatttctgtgtatttagaatatatgcagtagatgtattaaatgaataaaaacctggtctatatttagtgattttgtggctgtgtctcatcttgggtcttggctttactccttagcatctcagtgaagttgcctctcatgatacgtctgaatctcgtgtcttcacttgctgcagccacaacctttggtgactcgggtccctgacctgtcggtgatccaggtgccgtgctttccgttgcttctttcttccccaacaagcctccttctccaaacaagctcgtgacggatgatgcaatccccaagtgagcacccatagctttactaattgcttcaaatgtcccacctgatctctccttcattatgatctctaacgcttccttgtgagctggatctagcgcatctggatctttcagtaggttttgaatcgctggaaggaggtattctttgacacttgtttgagacaaatcagttgcatcgagtgcacgaatggcttcacagaatgcgtt

SEQ ID NO: 682 - DNA, 540 bp, Arabidopsis thaliana
ctttttttttttttttttttttttaccaaaaaaaacttaataaaataaataaatttaattgtcattcaaaactttacaaaaaaaatatcacacgattcttaatcttctctatgtaacaagtaatcttctctaaatctccttctaatggagaaatcatacgaacgagttaacgtttctctgaatcttctcaagtcaagcttcacgttctgtccttgtagatagattttcttcgtatattcccatcctttgtcgtttagactatccggatctcggattacagggtcatctttcccatattcttcatacaaagagctctctttcggcgcaatcttgtaaccaacgtacttcaatcctagcttcttcgccggttctccataatatgtctctgccgcccagtccgtccctaatgggatgatctgaatgaaaacggttttcggtttcaagaaaaggaaatgagtcattgctgctccatgtacaccgatcattacatcgctcgtgttcaacgaacgataaatcttggccatttccgttgtcttttgt

SEQ ID NO: 683 - DNA, 540 bp, Arabidopsis thaliana
cttttttttttttttttcatcaaaaattcataaccactattattatattgagataccgatttacaaagatctaataagcgattttaaaatctagaggaagagagggagacagaagagacacacatggaaaaatctcagccgtccaatccaatcttcgaatagatttaaaaaaaagagagagaagaaaacaaaatctgtttcgtcttccacaagatcagaaatcaacgagatgagaagagaaatctggaatcgcagatgatcgactagtactactactcgacggagaaggacaaggcagagagaaaccaccaatccgtacaacgttactatcgcctcgccgtctcgatggaagaatcccggcggttagtttcgcgagagccgtcgtgtactctactagtaactcagcgatgattacgacggagatcatgatcgatttataaagttggaagattcaggtagatgaatttgcaggagaagaagaaggatctagaaatctctgatcttttttgagaagtgtgattggtgttgtcggacgcgtgg

SEQ ID NO: 684 - DNA, 540 bp, Arabidopsis thaliana
catcctgcagatgaagaatccttcaagcccttggattggccttcaaggctgaaaatcgcgattgggacggcaaaaggattggcatggcttcatcatagctgcaacccgagaatcatccatcgcaacataagctcaaaatgcatattgttgactgcagagtttgagccaaagatctcggatttcggtctagctaggctgatgaacccaattgatacccatttaagcacatttgttaatggagaatttggggatttcggttatgttgctcccgagtattcaagaaccatggttgcaactccaaaaggagatgtctacagcttcggtgttgtgcttctagagctagtaacgggccaaaaagcaacgagtgtaacaaaagtatctgaagaagaagctgaggaagaaagcttcaagggtaacctcgttgaatggattacaaagctatcaagtaaatcaaaactgcaggaagcaatcgacaggtccttacttgggaacggtgtggatgatgaaatcttcaaagtacctgcccgggcggccgctcga

SEQ ID NO: 685 - DNA, 540 bp, Arabidopsis thaliana
cttttttttttttttttcagagataagtgcctgctgatattagaacattcaaaatgacaatacatcactgatcaattagcaactagcaaaccaatgccctcatttattaattattaggttattatagttcttgtagtagcttcctttaagattttctgcttgtctcactggatactgtcgcagtcagtggaagggctgaacttgtaagggagatcgacaccacatttagaaggcaattccaaagcattttggatggttctaggagagagagtgagtcctccaatagcagatttgatgcaacgacagaccccctgacggtccacagaagtttgagcctgactcttgagtgttgtgagaccgttgcagcagagggttgggaccggtccgccctgagtcacgtaggataagcaagggtaaagatccgcaatcaccgtgttgcaagacacggctgcttcaccgcagtgtaaagcaagaaccaggcacacggctaataagagagatctcatgttactttctgttttttttttcggacgcgtgggt

SEQ ID NO: 686 - DNA, 540 bp, Arabidopsis thaliana
ccttttttttttttttttttttttttttttaagcataaacaggacatgcttccattagagtgaaccttagtgaaagagtagatagttacagttaaagcggcataacagtagttattaggtgagaatcctgtaaacaagcattgacttgccagatagatgtagtttggagactataatttacctaaatgtgttttcataaattccaaagccaaaagaagagtttggtcctaagaactgaaaagcctatcatggtaaagaaaaaaagtatcccttacgcaggcttctcaacatgtgatgtcaatgccagctgtcatcttcatttccgttagcgccaacttgacgagcttctacggtttgggagctgctgggcgagaatgtgggcggtatggaatgatcaaatctacaagctggaccaaatttgcagatgccatatcggctgtagtgtgtgcacatgctctgatcaggtcttaggggcaagcccttgtcattgaaagagaatgcagcttgcttcggcaatctatttttcggatgatggtattt

SEQ ID NO: 687 - DNA, 540 bp, Arabidopsis thaliana
  misc_feature (1)...(540): n = A,T,C or G
agttcttttttcttttcttttgctcttcgtaacccaaccaacaagactttcataagctattaaatcagaaccctggaagacaaaaaaggggaaaaaccattatccttaaagtaaccaacacttctctctctctttcttcaatggatttgcaactgaaacaatggagaagccagcagcagcaacaacatcagacagagtcagaagaacaaccttctgcagctaagataccaaaacatgtctttgaccagattcattctcacactgcaacttctactgctcttcctctctttacccctgagcctacttcttctaaactctcctctttgtctcctgattcttcctccaggttccccaagatggggagcttctttagctgggcacagtggcaagaacttgaactacaagctctgatctacaggtacatgttggctggtgctgctgttcctcaggagctccttttaccnnnnnnnnaaagccttctccatctatctccttcctactttcttcaccatcctcttcaacacctacctcattaccaac

SEQ ID NO: 688 - DNA, 540 bp, Arabidopsis thaliana
aaactttttgctctctgaaactctttcaccaactccattcaagtctctcgtcgatctcgagccattgccggaaaatgatgtcatcatatcgaagaacacaatttcggagatatctcatcaagaaccgccaccacagcgacaaccaccagctacgaatcaagggaagaagcggcggaggaggaagcctagggtttgcaaaaacgaggaagaagctgagaatcaacgaatgactcacattgccgtcgaaagaaatcgaagaagacaaatgaatcaacatctctctgtcttgcgatctctcatgcctcaaccttttgctcacaagggtgatcaagcttcaatagttggtggagccatagatttcatcaaagaacttgaacacaaattactatctcttgaagctcaaaaacatcataatgctaaattaaaccagtcggttacttcttcaacaagtcaagacacaaatggtgaacaagagaatcctcatcaaccatcttcactatctctatcgcagttctttcttcattcatacgatccgagcca

SEQ ID NO: 689 - DNA, 539 bp, Arabidopsis thaliana
ctttttttttttttttttgtaaagaaattttcataacaaagctttctaccaagtgaccactaaagcattgttaagagaaaggggtcaccaatgaccaaacaatagagagaaagtacttagatcaaagaaaatgtagaacataaaatccaacactaaattgagagagttcaaataaaaagacaaaataactaagagaacacttagtcgacttcctcgatcttgggaccagcaccacctgatgcaggaggagcttcatcctcgtccattccagaagctccaggaccaccagcttcaccaccagctcctccttggtacatcttagcgatgatcggattgcaaacactctccaactccttcatcttgtcttcaaactcgtcagcttcacccaattggttaccatctagccattggattgcttcctcaatagagtcctcaaccttcttcttgtctgcagctggaagcttctcaccgatcttctcatcacggatggtgttcctcatgttgtaagcgtagttctcaagagcgttcttggcctcgac

SEQ ID NO: 690 - DNA, 539 bp, Arabidopsis thaliana
tgggtttccctttcatatcaagtaacaacaaacaattttgggccaaacttaatcaaagaaacaacaaatccttgcattacacacctccccacatctttttccttatttcaatcttcctcccttcaacaaaagatctaacataaattcatctatattttatacattctcacaattttcacccctcatctttttaattgctcccccatgccccaaaatgtcccttaaaacggaatcgatccctcacaatattggtttgtccatcagctcgttttcggctgcgatccttcccgagccacggccggttatcctaccgaatgatccaatagttgatagtcccatgaagctgctgctttcttcgccaaggtttattgatcttctatgttttctgaatttggaggagctaacatcacctgcctcacgatcaacaacaacaacatcatctaggcttttgctcttttcgttgttgttgttgttgttctgggcgacgactaaacatgcaatggtgcttctacagaacggacagaccggtggagtcacgg

SEQ ID NO: 691 - DNA, 539 bp, Arabidopsis thaliana
aggtgggggataagtcggattgtgtcagcttcgatcttcgtccttctgatgcaattaatatagctgttagatgcaaggtacctattcaagtcaacaagtatctagcttatagtgatggaatgagagtcatcgattccggaaagctatcaaagcaaacacctgcttctgatggtttattgtttactgaactagaccggccaaatggtcagccttgttttgatacaaaagagttcgatctagtaaggaacatgatgcaagctgttgatgaagaacggtatgatgaagccgctgagtggagagacaagcttggcaagtttcaggcaaaacgcaaattaaggaaatacacatgacagctcgcagacgggagtgtttttaatacataatttatgtaaataataaagaagccattgccatttgccagaagctgtgatcatgaagaaaaatatctctctcgtatgagatatacttttctctatcgacacttgtgcacgtagttgattctcaaggaacggacaaaataaaaatgttattttataatt

SEQ ID NO: 692 - DNA, 539 bp, Arabidopsis thaliana
attcgcggccgcaaaagagtaagggtagatagaaaaaaagaacgcatttacattcttcttataacgttgtcgtcgaaacgtttttaaccttacttttataagctttattagtcttcttcaagccttataaaagaaaagaaaaaaaaggcaagttagagagagcgagagatttagcagcaggtaaaggaaagagagacagtgacaattgagaagtaaacggtcactaaggatctgtagaccttttgatggtaagctctgctctgagatggagaatgccattgatgaagtattgactatcttccgctataaaagacgtccatgggaccccaaacaggtttctgtaacctactgctttccctcctgtgaatgtgtagttccctttgtatttgcttatgaaatcctctgcgggctttgaccttgccgagaattcatagtccactccgaaactcaccgaccctttctcctgcatccctaggaacagcccgaaacagtggaacgagctctgttggtccatgttgcagtgagctgacaggaaaaac

SEQ ID NO: 693 - DNA, 539 bp, Arabidopsis thaliana
  misc_feature (1)...(539): n = A,T,C or G
ccacgcgtccggtaaaaccgttctttgttttctctatttctctcgtctctttcttctacccagatcactgattgattagtcgtgaattttactctactctttcatcaattttactgtgtttaattcataaaacaaaacaaacgatcgatttttgtttttttttggggatgaagatcagaagcaaaagcaaaggctatcgtcaagagatcaaatcaacttgcaccgactccaacactctgttctcaaaagatgtggttgcaacttcggagcttttttcatctgtgatatcgtagcgtgtgaaagacggataattctacagagacaatgcatcatcccattcggctaggtcaattttcatctctatcttgtttataatctataatcttatagatagtttaattacaaaaaaggtttttatactatttttgatttttcaaaacaaaatatatttctcaaaaaaattatttttaatgnttttcaactctctcttttttttttcttctataatactaaattaatatgacgttgtgaaatctaac

SEQ ID NO: 694 - DNA, 539 bp, Arabidopsis thaliana
ttctttcacttgctggagagcttgcctggacttgttataacttttaccaatcgacaccaacgaaacttgctggagagaactatttcttcactgcagggcaggacatgagtgttggcacatcttggaacattttaagaccagaaaccgttgaatcactgttttacctctggcgattaactgggaacaagacatatcaagagtggggatggaatatatttcaagcatttgagaagaactctcgcgtagaatctggatatgtaggcttgaaggatgtcaatacaggtgctaaagacaacaagatgcaaagcttcttcttagctgagactcttaagtatctatatcttctcttttcgccttcatctgttatttcattagacgagtgggttttcaacacagaagcccatccgcttaagattgtggcacggaatgatccgcgtaagccaactatagcactacgccagaggaagtttggtcatcagattaacgtttagtagacagtttctgctcaaatggaatttgatattattatatattaccac

SEQ ID NO: 695 - DNA, 539 bp, Arabidopsis thaliana
  misc_feature (1)...(539): n = A,T,C or G
cctcctcaaacaaaaacaaaaaaacctagcttctctcacaaaacgcatgcaacaacatcgaaattaagaatcaatcaaagcttcttcgttcgatcacactagaaagaaagatggcaacgtctggtgcgatttcaggagctactgtctcttccttcttcaccaaaactactactacttcaaacccatctcccaaactccattcctctgcttctcttttatcacagaaaactgtgtttcaaggagtttcgttggaagattcgaagaagagtgtatcagagatcttcgctgtctccgagagaaagatcggagggttaaatgggttgagaagattcgaaatcaaagcgagagcagcagcttctaagacaatagaggttgaagtagataagcctttgggtctgactctaggacagaagcaaggcggtggagttgtcatcaccggtgtggacggaggagggaacgcagcaaaagnnnnnttaaatctggagatcaagttgtgtacacaagcagtttctttggagatgagctttggcctgcagata

SEQ ID NO: 696 - DNA, 539 bp, Arabidopsis thaliana
ccacgcgtccgcgagagatgttactccatgagaataccaaacccacttcgctctaataattcaaaagatttcactttctcaaacaaaaaaacttctctctttcttttctaatttctaaaaccctaattgaagttccaacaagatcgatcaaagagaagatggatctcgaggattgggaattagtactccccaagaacagcttcaaggatcttgatcttgatcatgacgaggatcatcatggagccatggtgatggactacttcctctgcccatctactaaagatcctctccccaagacagagtctcctccaagatccaaagtggtccctaaaaagattcttcaagttcccatagcttgggaagccgtgttggatcaagacaacacgaagatacccaataaccctgatcttgaaccggatccgcatccggatccggattcaaaaccgaccctttcgacggactctgtttcgtcaccaagagtttccttcaagatcatgaaggacactgaatttgccgacatgaaaattgacccaccagcg

SEQ ID NO: 697 - DNA, 539 bp, Arabidopsis thaliana
tttttttttttaaatgaacgttcaatttagtattttactgaaaaatatacttcatacatcatcagagaagcttacatgatttgcatgatatatttattcaaaaggtttggtccaaaccgtttggagtttggtctgatcactgaactcgaactggaacgagctggagaggtactttcttgacgattgtaagagtaccagcttcttcagtatcaatatctttatgtgtcatcccatcaggcaacttccaatcgaagaagtaaagtaagttcaagagtcccaattcgacggcagcaatccccattggcatcccgggacatatccttcgaccggacccaaatggtaagagctcgtaatgttgtcccctataatcaacagagctatccataaacctctcagggtcaaactcttccgggtttgtccagagtttgggatctcttccgatagccgaaacattgaccaagatccgcctcttgggaggaatatcatacccttgaactttgatgtgagccattgtttctcttggaagtataagaggagct

SEQ ID NO: 698 - DNA, 539 bp, Arabidopsis thaliana
ccacgcgtccgtgtgtcgtaccaaagcgacccaagtgtagtcatagctaagctagatgcaaccgcaaacgacttcccaaaagatacctttgatgtgaagggattcccgaccatttacttcaaatcagcgagcggaaacgttgtggtttacgaaggagacaggacaaaggaagatttcataagcttcgtcgacaagaacaaggacacagttggagagcctaagaaggaggaagagacaagtgaggaagtcaaggatgagctctgaaaagagaagtgtgtttgtgtctcttagctgctagcttagtttggtagttttgaggaaaatacacagaagaagacagagctttgagtagacagagagaagacaaagagagagacgacagacagacagagaatctctttatctattcattaggtttttatatgtgcactcttcagaacaataatggctgcctccttttcttttttttggttgatgttacctttttttgtttgaattcagttctcctttaatatagtttttgaggcaaaaaaaaaaaa

SEQ ID NO: 699 - DNA, 539 bp, Arabidopsis thaliana
  misc_feature (1)...(539): n = A,T,C or G
gaagagtaaaattcaaagcaaacggtcgatctcaaacgagtaacagaattctgaaaannncttgaatctaaaaatcaaaaagtcaaaacaccaaaccgactcaaaccccacacaaattaaataccaaacacacaaaaaaaaacactcataaaaaaacctaaaccctcagattcaatacaaatggctaattcggtttactttctgcagtaccaggtaaaccggtaaaaccgattannngagagaaacaatacgagccttttctaattccaactcttactaaatctctagagatcgaaaccttttgagattaaacatgtttatctccttactctgtacagagtcttgtcctctaagaagaagtgacttctctctgtttctttctctcttcctctctcgctaaagctttcttgggaagaacatgagcttcatacaacgcaagaatctctttcttgttttgatggcctctgttcaataacaaatgtccacaatcgtacttggtcagctcatgctttagattctgcacagtaagcttcctgtaa

SEQ ID NO: 700 - DNA, 539 bp, Arabidopsis thaliana
ggattatcatcttattatacaactctccaggcctgtcggatttttctggatactctctttctttgtcggaacttagcattctttttctaacactataaacataggaatgggtcctgaaaaaaattccaattcccaaccccaatccacccatttgcttcttgcagttgtatgttcttcctctttcgaatccgttataacaccgagtcactttcctcatcgcgttttcgctaaagattgtcgagtcgagacaccgtgcagcagtttgacaaaacccaagaaactcagcttcccgtcagtatgtcttatccagtcatttagaatggtatgaaccgggatggatgatccaacaccaagttcagaagcgagttcttcgatgacgataactcggtttccattcatttcaaatagctcataagcatgacgaatgctctgctcccaacaatcaagagactcatgctgatgaacgctaatggaagctgcacaaaactcttcaaaatccatccctttgtattgaagtccatttaacaatgcaagaaagt

SEQ ID NO: 701 - DNA, 539 bp, Arabidopsis thaliana
cttttttttttttttttttttttagtttggacacgatggtggtttgatttaggaaaacgaatctgaagtacaaaataaaacagattcttctctgtttagtttatcattacatagaagatctatggaccaaacgacgtccaccaccatttaaaccacaaaggagactagcttgtggtcgtttagattttccttgaccgttactaacaccgtcaacgaccttttgaacattggaggtaaaatcatgtacgggagtgactgtcagagaagcggagtcgccggtacgagcatcaagccaattgacaatgtcagcaaaaacgaggtcaacgttagcatcaggctcaccagaagttaatccatgccacattcctgggtaaagtttaatggttttgtcgcgtgtgcttgccttctcgaacaaggctttgcttatctctggatcagtcacaatgtctgcttcaccgtgaaggacaaagaaaggcaatgtgatctcgtggagagtgtcttcaaggtccatgctcgttctaagcatttcaagtgcggtt

SEQ ID NO: 702 - DNA, 539 bp, Arabidopsis thaliana
tgtttgtttgttgttcttcgattgaaaatggtgaaatcgacgagtaaggatgctcaggatctatttcgatctcttcggtctgcttattctgctactccgactaatcttaagatcatcgacttgtatgtcgttttcgctgtcttcaccgctctgattcaggtggtttatatggctttggtgggatcatttccatttaactcgttcctatctggagttctctcttgtatcgggacagcagttcttgctgtttgcctccggattcaagtgaacaaagaaaacaaggaattcaaggatttagcacctgagagagcttttgctgattttgttctctgcaacttagtcctccatttggtgatcatcaacttcctcggatagaggtttcactctcctgtctacaagttgctttcatgctttaatgtactggagtttttaggtgtcacttggaatcaaaactctagtttgagatatttttgttgttgtcgaagtatcaaacttttattagtgtctctctcactcaataacagagtctcctgcagtaa

SEQ ID NO: 703 - DNA, 539 bp, Arabidopsis thaliana
ccacgcgtccggaaaaaaagaaatctaattctctcgagaaaatgtctggtcgtggaaagggaggaaaaggcttgggtaaaggaggagccaagcgtcacaggaaggttctgagagacaacatccaaggaatcaccaagcctgccattcgaagattggctcgtagaggtggagtcaagcgtattagtggtctcatctacgaggagacacgtggcgtcctcaagatctttctcgagaacgtaattcgtgatgctgtcacttacaccgagcacgctaggaggaagactgtgaccgccatggatgttgtctacgctctcaagaggcaaggaaggactctctacggattcggcggttaatcagggtttttcagatttgtgtttggagatctgtttctggaaattagatttgagaatttcaatgtaggtattttagtaaatgtagcaagatttgatttcctttttttgctatttcgcttttgtaatgtgttttcatttgctaaattctcaacaatggaaacacgcaatttggtgaaaaaaaaaaaa

SEQ ID NO: 704 - DNA, 539 bp, Arabidopsis thaliana
tttttttttttttttaagtcttaaccaacataacattaaactgctttcacatagaaagcaaaagtcttaaacaacattacattaactcctttcacataaacagaaaagtcttaaacaacattacataaactcctttcacacagacacaaaaggctctttcttgctcaacgcatcaacactcttagttcaagatttcacctgtaatgggtgaaacatgttggctcgtagacttctgcccatttttcgaaccgaccactaccataggctttggtggtatcaaaccggccctgaaaagcatgctttccactgtgtctgttggttgagctccaacagataaccagtacttgattctgtcgaatttgaggctcactctatccgcatcttctttgccttggagtggatcataaaagcctaacacctcgatttgtttaccgtccctgcgcgatttttcatcggcgacaactacacgatagaagggtcggtgtttacaaccaagacgcgcgtaaaaagagattacaaagacagtgagagtagaaagg

SEQ ID NO: 705 - DNA, 539 bp, Arabidopsis thaliana
gcggccgccacggagcccaccaccgggaccgagaagcttcaccagccaatagaagttgaagaagatgacgaacaaattgttgatttggagaggaaaacattccgtcatggaaagggacacgatactagtgtggacagtagtacaatcaccaacaccagctcgtcgtcgtcttctagcttttccggtgatggtggaacggaagagacccccgatttccacagcaacggcgatggagaacataccgatttagtaaatttggaggtcccggagctagaaactgaaatcgtatttcaccaagagcatgacgacgggaagaattgcatcgtcttcttcgacggagaacaaggttctgagtcagctggtgccatacctgatgctcatgaggagtctcaaactgctgacttgaatggggagcaaacgcagttagaacctgaaaacggttcaacttctgaggataacgaaagatctcgtgaaattgaagaagtactagatggtgatgtctctaaagacttggatgctgttgatccactcgctggtga

SEQ ID NO: 706 - DNA, 539 bp, Arabidopsis thaliana
  misc_feature (1)...(539): n = A,T,C or G
tttttttttcttttgaatatcatttaacattttattcaacaaaataataataaatcaaaatagattacaaggaagaagagccagagaaatttctctgcaactgagtcatatcttgagaagcaacatcaattgtaccattgagaaaaccagtgtaccaagaagcagagagctttggcgacctcttgcgaccaggatcgctaaaattgacatagtacattccgaagctgcttttatatccaacctgtacctcaaacaaatctatcagcgaccatacgnnnaacctctcgtgtccgatccactcttgatagcgttgaggacagcaccaatgtaagcttgaatgtattcaactcttggtgtgtcttgtagcatcgaatcgtgtttcatcggtgaaccattttcaagaatgtagattggaggattgttatagctatgctttatatgctgaagaacaccttccagaccccatggaacagcatcaaacacgaatgatgaagagttcccagtggagataatatacgcgcccatgtctgtaaagaagt

SEQ ID NO: 707 - DNA, 539 bp, Arabidopsis thaliana
  misc_feature (1)...(539): n = A,T,C or G
acattcgtcttcgtagtcagacaaacaagaaacaactacagtctctacaaccattgatttacattcttctattttcaatcttaatctctttccggcgtcactcccgttactcttcttgaactcagattccctgcatacgaccatgctttctctgtttctcccactattcccttctctctcgtcccattcctcttcactgaatacagcggcggtgctctcctcgggcttcttgatgctacacttagggcaggcgttgcaaatggtgaaccgtgcggagagctctgcacagagaacgctttttgagggttgagtccattgatgctgaatagggatagcgattctgtgacagagatggatcttctcatggcatcatcaacataaagcacatcatctattctggccgtgatgttgaaggccatgctctccatcaccctagagtaactctccagaattgattgccctacatccttgttgtactgaatcttgnncatgtccagcgttgtctggggaagtcccgggaaacggatcctgagactctg

SEQ ID NO: 708 - DNA, 539 bp, Arabidopsis thaliana
atcatggaggtgttatctacttcctcacctctaacgcttcactcccaccgactcctctctgcttcttcttcttcttcacatgtcacctccatcgccgcttcttcactttcttcattcgcttcttcatatctcggaatctccctttctaaccgcacgatccaccgcttctccacaactccgacgaacttaagacgatttcctcaaagaaaacggaagaaattcactccgatttcagcggttttcgaacggttcaccgaacgagcgatcagagctataatcttctctcagaaggaagctaaatcgttgggaaaagatatggtttacacgcagcatcttctcttaggtttgatcgctgaggatcgtgatcctcaaggcttccttggatccggtatcaccatcgacaaggctcgtgaagctgtttggagtatttgggacgaagctaattccgattcgaaacaggaggaagcttcttctacttcgtattcaaaatcgacggacatgcctttctctatcagcacgaaacgagtctttgaagctgc

SEQ ID NO: 709 - DNA, 538 bp, Arabidopsis thaliana
tggctaatcttcgattccttagagtttacaaaggtaaaggtgatgggaatgatagaatgcatattccgggggaaatggagtttccgcgtcgtctaaggctacttcattgggaggcatacccaagcaagtgtcttcctcctacatttaatcctgaatatcttgtagaacttaatatgcaacaaagccagctcaagaagctatgggaaggaacccaggttggtggtgggactttaaatatgtgaatatctattctcttttttcatgttatgtgatgctctttatcttccgttgtgtggttctctacatattcagccgcttaaaaatctcaagaagttgaatcttagtgcgtcctaccgtttgaaggaactcccggatctttcaaatgctacaaatctgaaggatttgaatatgaattattgcgagagtttgatagagattccttcctctttttcgcatcttcataaactattggggttggaggtggtgggctgcataaacctacaagtcattccagctcacatgaacttggcatcccttg

SEQ ID NO: 710 - DNA, 538 bp, Arabidopsis thaliana
ttttgttcttaatagaaaggtttaaagaagtttggtgctacaacaaatcaatagtgatgacacttagaagaagaatctaatcaaagagaggagagacaataaaaactagatggcctaattaaggattcctaaaggctcttctcatgttgtgcttaatctctcataatatacaaacaaaatactctcaacaactacttctaacaatcttctctctttcagatcttcaaaggctttgttaaactgtaaatgtttctactccaattgctccagaggcacacgaacaaataactgcccgtttagggttaccacagccgatgtgtgatgcggatcgattctcgttggtaaacttaccacctttttgaaaggagtagctccccaaggattcatagggttctcgggttcgccacttattactaaccgcccagccggatctgattggactcggacctcttcacggactaatcctgggactaatgcatacacctcaaagcaatcttgcgttctctgtacgttaatcttcacccagtcagctggtggt

SEQ ID NO: 711 - DNA, 538 bp, Arabidopsis thaliana
  misc_feature (1)...(538): n = A,T,C or G
ctcatatgcagcagatcaacaaaattgtagccaatcttccgtccgtcttggctccgccgttcggtttccgttaatattttacaaaatcatttcattttcttttttaacttccaaaaaatcgaattttgttgaatcttctaagctcaagctaataccgatttcgaaatggaggaaggtcgtgacgacgagtattgtagtttttctaattccggcgatcgcgacngtggattgagcggttgttttttcttggatcatgttggccaagttttgctttctcgaaatcatgatggtnnnnnctggaaatgtttggattcttcagattgtgagggaacaacttgtttgggaattataatttgcgagaattccgaaactgagatcaaattctctgatatttatgctgtggagtttgttagctatggcttggtgcatagtccaaagttaggacttagacatgccaaagaatgtttccgggaacgcttgttaaatactcaagagatgtatcggttcactgtccacggatttcaaagttcaccaaaag

SEQ ID NO: 712 - DNA, 538 bp, Arabidopsis thaliana
caactctgctccttatctcagcttgttgaatttgcgaagtatgggagacgctagagacaacgaagcctacgaggaggagctcttggactatgaagaagaagacgagaaggtcccagattctggaaacaaagttaacggtgaagccgtgaaaaaagggtacgtgggaatacacagttctggattcagagacttccttttaaaaccggagcttctcagagctattgttgactctggatttgaacatccatctgaagtgcaacatgaatgtatccctcaagctatcttgggcatggatgtcatctgccaagcaaagtctggtatggggaagactgctgtgtttgtcctgtctactctacaacagattgaaccatctcctggccaggtttctgcacttgtcttgtgccatacaagagagctagcttaccagatctgcaatgagtttgtgcgattcagtacctatctgcctgatacaaaggtttcggtgttctatggtggagtcaacattaaaattcacaaagacttgctgaagaatgaatgt

SEQ ID NO: 713 - DNA, 538 bp, Arabidopsis thaliana
tttttttatagaattcattctttacataaagcatcaacagtggggttctttatgaaacacaagtgattgacttgacagtaagctagtcaaaagacgagatagaaaagatggcagtaacatataccatagtagacaagtgtgttggatgggttctgcttgataacgatgtttacataacatggaacttagaatgaaacctgaatgcccaacaaagccattagttgtgaaacaaactccgggtgtccaggccatgctgcgccagttactagattcccgtcagtgaagcacctgtcgattggatctggttctagccaagttcctcctccaagtaccacgttcagtttcacggctggataagcagtgcatttccttcccttgaggacaccagcagcagctaagatctgttgtccgtggcaaatagacgcaactggtttctcagaattcatgaactctttaactatgttaaggacatgttcgttcaaggccagatattctggtgctctgcctccaggaatgaccagagcatcataactcgagg

SEQ ID NO: 714 - DNA, 538 bp, Arabidopsis thaliana
  misc_feature (1)...(538): n = A,T,C or G
ccacgcgtccgagggaaccatgaaggtaatggagtgatcatttcttgggtgactccggttaagcccggttctaagactgttcaatattggtgtgagaatgagaaatcgaggaaacaagcagaagcaacagttaatacttaccggttctttaattacacgtctggttatattcaccattgcctcatcgatgatttggaatttgatacgaaatactactacgaaattgggagtggcaagtggtccagacggttctggttctttatcccgcctaaatcaggccctgacgtaccttacacatttggattaattggggatctaggacaaacttatgactcaaatagtacgttaagccattatgagatgaatccgggaaaaggacaagcggttctgtttgtaggagacttgtcttacgcggatcgctaccctaaccacgacaacaatagatgggatacttggggaaggntcgttgagcgaagtgttgcttatcaaccttggatatggactgctggcaaccacgaaatcgacttcgttcctgaca

SEQ ID NO: 715 - DNA, 538 bp, Arabidopsis thaliana
  misc_feature (1)...(538): n = A,T,C or G
atttcccgggagatttctcttcctcttggctgagttagaggaggtaggattaggnnnnnnnttaggatttggagcgatgtgttcttggtgaaggacatagctgggaaatgagaggggatgatgatcatctggcatcatcatgctgatattggtttagttgaaagacagagaaagagagagtttctaagtaagaagacaaaacacctgcccgggcggccgctcgagaaaaggcaccggaggatttgtcctctaccttctcgtggctttctccgtcgccgtcttctctgtttcttacgtcggagacacaacaaaccctaatcatcatcatctctcttctctctctgccaccgagaaaatttggccgtgatagcgtttctaggatcagcttgtgggactgttggtggtgttggaggtggtgggatttttgttcctatgctcactctcattcttgggttcgatacaaaatctgcagctgcaatatcaaaatgtatgataatgggagcatcagcatcatcagtttggtacctcggccgcgacc

SEQ ID NO: 716 - DNA, 538 bp, Arabidopsis thaliana
ccacgcgtccgaggaattatcaggttttatataaaatagcaaaagaaatgcaacagcacctgatgcagatgcagcccatgatggctggttactaccccagcaatgttacctctgatcatatccaacagtacttggacgaaaacaaatcgttgattctgaagattgttgagtctcaaaactctggaaagcttagcgaatgcgccgagaatcaagcaaggcttcaacgcaacctaatgtacctagctgcaatagcagattctcagcctcagccaccaagtgtgcatagccagtatggatctgctggtggtgggatgattcagggagaaggagggtcacactatttgcagcagcaacaagcgactcaacagcaacagatgactcagcagtctctaatggcggctcgatcttcaatgttgtatgctcagcaacagcagcagcagcagccttacgcgacgcttcagcatcagcaattgcaccatagccagcttggaatgagctcgagcagcggaggaggaggaagcagtggtctccatatcct

SEQ ID NO: 717 - DNA, 538 bp, Arabidopsis thaliana
ccacgcgtccgtaccccaccggttacaacaacatttccaccacttcccacaaccacaatgccaccatttcctccttcaacttctcttcctcagccaactgcgtttccgccattaccaagctcacaaataccttctttacctaacccagcacaacccattaatatcccaaacttcccacaaatcaatatccctaacttcccaatttctatcccaaacaacttcccattcaatcttcccaccagcattccaacaatcccattcttcactccaccaccttccaaatgagaagctaattaagctctatagctagctactgccacacaacacatgaccacgataccatctatctattgtttgcatattatgtgttgtaaacttgtaatgttttttattcttttttttgtctaagtttgttattcttttactgtcgtttgatgttatccttgttgttgatgttgttttcttttaatcagttgtttttgtaatatatacagcttattcttattctattgattacaaactttcttgttccgaaaaa

SEQ ID NO: 718 - DNA, 538 bp, Arabidopsis thaliana
caatcggatcttttgttaaacgctgatgatttggctgctatgtgggtttgtttgagagaaaattgtgtgattgatgatgccactggtgctgaaaagatgaactatgaagacttctgtcacattgcctctgtatgcactgaacaaatcggtcccaaatgtcgccggttttttagcccatccaatttcctacagggtgtatgttccatagtgaaggagggttaatgagctttgagcatccaatgaacaagatcaaggcgatgccgagggtagacagtgaaggagttctatgcggtgccaacttcaaggtggatgtgtacaatcgtgttaacagtatccctcgtcgaggaagtgaagccaattggtctctctgaatacttttaataacactttcaatttggtttctttttcgcacttgtgcttcttctccgctttcatcttagttatggactgttcctaagcttgccatgaataaaactgtgaataataaagcttttaatgttctgtttcttactttaagtcagacaataaacttttaaca

SEQ ID NO: 719 - DNA, 538 bp, Arabidopsis thaliana
atttaagaaacaaaaatccacaaggcaaatttgcatcccaaaaaaaaagcacagaccgaatattttttaaaagagaaaaatagcgaaaatgaagcgataaatttgttttaggacagtctccatatggacttctaaatatacaagcagattcctttcatgagccaaccacttccatagttgttctttttttgccctaagccaagtacctaaacatgttaggattctccttgtccctctccaaataatctctggttattaaatcctccatacgcttcttgatcgctttgatatcaggcttgaacattcggctaagttgctcaacacactcagaaacaagttgttgatgtcccaatactttcctgctcttcatgatcctgacaatggcagcatcaattgcatatcttctgtctttatcgacatcttcaacgactttcttcctttcatcaactgggggaagagggatcttgattctgcgcattctatcggtgaatttggagttgaactcaaaggcatcattctgggagacagtcttggtgtt

SEQ ID NO: 720 - DNA, 538 bp, Arabidopsis thaliana
gaaaaatatgggtatccaagaaactgacccgttaacgcaattgagtttaccaccgggtttccgattttacccgaccgatgaagagcttatggttcaatatctctgtagaaaagcagctggttacgatttctctcttcagctcatcgccgaaatagatctttacaaattcgatccatgggttttaccaaataaagcattatttggagaaaaagaatggtatttttttagtcctagggatagaaaatatccaaacgggtcaagacctaaccgggttgccggatcgggttattggaaagctacgggtacggataaaataatctcgacggaaggacaaagagttggtattaaaaaagctttggtgttttacatcggaaaagctcctaaaggtactaaaaccaattggatcatgcatgagtatcgtctcattgaaccttctcgtagaaacggaagcactaagttggatgattgggttctatgtcgaatatacaagaagcaatcaagtgcacaaaaacaagtttacgataatggaatcgcgaat

SEQ ID NO: 721 - DNA, 538 bp, Arabidopsis thaliana
caaaatcactaaagaggagaagattgctaaagtttgataaaacattccaaaatcaatggctgataggatcaaaggtccatggagtcctgaagaagacgagcagcttcgtaggcttgttgttaaatacggtccaagaaactggacagtgattagcaaatctattcccggtagatcggggaaatcgtgtcgtttacggtggtgcaaccagctttcgccgcaagttgagcatcggccgttttcggctgaggaagacgagacgatcgcacgtgctcacgctcagttcggtaataaatgggcgacgattgctcgtcttctcaacggtcgtacggacaacgccgtgaagaatcactggaactcgacgctcaagaggaaatgcggcggttacgaccatcggggttacgatggttcggaggatcatcggccggttaagagatcggtgagtgcgggatctccacctgttgttactgggctttacatgagcccaggaagcccaactggatctgatgtcagtgattcaagtactatcccgatattacct

SEQ ID NO: 722 - DNA, 537 bp, Arabidopsis thaliana
ttttttttttttttggcaaattaagccaacttgaaattttgtggggtttacaatataaatcaatatatatatatatatagagagagagagagagagtgagcactgagcagagtcaggtccatagtttagttatactaccatcttcacatgaacttaagaactttaactccaaatgcaattcctatgaaagttgcaatggcgatcccaaatattccggccagaatcccgggaactatcaacgagttccatccctttgccgtcgccattccagctgcggtcgtgggtcctccgacattagcatttgatgctagaagcagtaaccttagctcgatgtttagcagctttcctatgcccaatatcacagccagatgtgtcccaatttgaaccaatgcaaacaagaatatgctcggcgccgtgttgatcacactccatatgtttccgcttgcacccaccactgtgaagaacacctgcatcaaaattagagccatggcttctccagatggagcaagacgaccaaactgggacggaaagacagtt

SEQ ID NO: 723 - DNA, 537 bp, Arabidopsis thaliana
tcagaacctgatgattaaacatatcaagaacatagtaacactaatttacaaagacagtaaccacccaccaacattatgcacaccaaaaaggggtattaccgttttctgtttacgacataaacgaccaaatagatccaccgaattttaaagccgttatataaactaagttccatacttatatatagatagatagatgaaagtagcctaaagagaagccaagagcttctaagagactcaaaaacctcactcaaatcttcatattaatacttacagatttttttgtgaagttcagtagttgtctcttcacgcagtggacagaacttccagctctgcccaccagagtggtgaaagttttgggatagtgtcgtctggtgataatccagtgatctctcgtaatctccctgtgacttccttcattatcggtctctgtttcgcgtctgctcttatgcagcttttgatcacttcacctatattctcaatcttctcgtcaaagctttcaattgtcggatccaccatctcccttaatgtctttcctct

SEQ ID NO: 724 - DNA, 537 bp, Arabidopsis thaliana
taaaaaaaattgtatttattttagttactgtaaaacgattttaaaactgtaattccatgagcaaattaagtgaacaaatttcattaaaaccacacaaataataaccataccacaatatactgaaaaacaaagaagagccattcctcacaaggagacccattcccaacttatttttctacgaacaaaagcaatatgaataacacatgagaccaaacaaaaacccaccactttgtagtataatagcatcatcatataactcaacagctgacaactctcgtgaactcaaaaccgtctgtgttttcttgtggttttagtttcttgggacgttaagccttagtcggaaatcttcttccatgagaggaagtccttctctgagcttcacctttggctcccaacccaacacttctttggctttactaatgtctggtttcctctgtcttggatcatctggtgtgttctccaccatctttatctctatgcttgggttaataagctccttaaccgtctcagccagttccaccattgtgaactcacctg

SEQ ID NO: 725 - DNA, 537 bp, Arabidopsis thaliana
cggccgcccgggcaggtactgcatcggtgatgccaatggtaaactgatgcttgctcatgcagctagtgctcaaggaatttctgtggtggagcaagtcacaggtagagatcatgtgcttaatcatcttagcatcccagctgcttgctttactcatcctgaaatcagcatggtgggattaacagagcctcaagcaaaagaaaaaggcgagaaggaaggatttaaagttagtgttgtcaagacaagtttcaaggctaacacaaaggccctagctgaaaatgaaggagaaggaatagctaagatgatataccgacctgacaacggtgaaatcttaggagttcatatatttggactgcatgcagctgaccttatccatgaagcttctaatgcgattgctctaggaacgcgtattcaggacataaaattggcagttcatgcacatccaacactctctgaggtcctcgacgaactgttcaaagcagccaaggttgaaagtcatgctacgacaaggacagtaagtgaaaaagtggttgtataata

SEQ ID NO: 726 - DNA, 537 bp, Arabidopsis thaliana
agcggccgcccgggcaggtattttttctcagccaggtgagagagagagacatcgaactatcgaagaccagagaagctaggaggatttgatctctccgattcggatatcttagctctggccgatagattctccggcgattcatcttctttatccgccgtaattttcgtatataggatcggtggtggcttttcaagatgccgtcgaacggagatctggaccgtcagatcgagcagctgatggagtgtaaaccgttatcggaggcggatgtgaggacgctttgcgatcaagcgagagcgatccttgtcgaggaatataatgttcagccggtgaagtgtcctgttaccgtttgcggcgatattcacggccagttttatgaccttattgagctctttcgtatcggtggcaacgctcctgatactaactacctcttcatgggagactatgtagatcgtggctactattcagtagagacagtttctctattggtggcactaaaagtgcgatacagggatagacttacaatcctacgagggaatc

SEQ ID NO: 727 - DNA, 537 bp, Arabidopsis thaliana
  misc_feature (1)...(537): n = A,T,C or G
cccatacccaagcagatcctttgaacttgctcactgttcacgttgtcgtatcgattggcttcaaagagatggtattcttcttctcgagctagacagggtgctaagacctggtggctattttgcatattcatctccagaagcatatgcacaagatgaagaggacctcnnnatatggagagaaatgagtgctcttgtgggccgtatgtgttggacgatagctgcaaaaaggaatcaaactgtaatttggcaaaaacctttgacaaatgattgttatttgggaagagaacctggaacccagcctcctctttgcaattctgacagtgaccctgatgctgtgtatggtgtaaacatggaagcatgcattactcaatacagtgaccatgaccacaaaaccaagggaagtggattggctccatggccagctcgattaacctctcctcctcctcggctagctgactttggctattccactgacatttttgagaaggatacagaaacttggaggcagagagtagatacttattgggatctcttgag

SEQ ID NO: 728 - DNA, 537 bp, Arabidopsis thaliana
  misc_feature (1)...(537): n = A,T,C or G
ccacgcgtccggttgctggagctcataaccgggagaagagcagttgatgaaggtaggaaccttgtggaaatgtctcagcggtttttgttggcgaaatcaaaacacctcgagttggtagacccgagaatcaaagactctattaatgatgctggaggaaaacaacttgatgcagttgtgacggttgtgagattgtgtaccgagaaagaaggccggtctaggccatcaattaagcaagtcttgaggctgttgtgtgaaagctgtgatccggtgcatagcgcatttgctaaagcggttgaagaagagataggctgggatagtaggaagagaagcaatttgagaattcaaagaggtgattcccggatctttggtccatcgtctagtactacttccaggtcacattacagccggagtttacctcactctccaattaacggattttctttctgagttagtcacatcttctctatagcnnnatctgaaagttttacatatgtttatgaaaattatgaattcatattgaaagctaaaaaaaaaaaa

SEQ ID NO: 729 - DNA, 537 bp, Arabidopsis thaliana
  misc_feature (1)...(537): n = A,T,C or G
tacaattgtattaagagattgaatctggtttcgaatgggggaaaaacattgcaaactacacgttttccaaaatgtagttgtcatggagatacgtataacaaaagaggttttcgaaaagtaacaaaaaaaaaaaatctaattacaagaataagagcttcacaagaaaggagcagtcaggagattgtttcaagagacgcagaaagatgctgtctagtctgcagaaatacccaaagctcctctctaacacggcaacctaaacttctaaatttcacaattttcttttgtttccttgggatgcttcaacaaccctctcaccaacagtactactagatccagagttgggtgcattccccaaagcaagtgaatctgcaggtccttcttccttttgagctttctgcttagttaagtgagtctctcgtatgctgcatttaggaaaattccctttnnnttcagttcccatcttcgaagaagcgggtgattctggtccttccattcgctttgccgccaacatatcaaaaggcctatgaaagagcaaat

SEQ ID NO: 730 - DNA, 537 bp, Arabidopsis thaliana
gaggaagacgagagttacaaggattgaaaatgaagggacgtcaaggagagagagttagattgtatgttcgtggaacagtcctcggctacaagaggtccaagtcgaaccaatatcccaacacttctctcatccagattgaaggtgtgaacactcaagaggaggtcaattggtacaagggtaagcgtttggcttacatctacaaggcaaagacaaagaagaacggttctcactaccgttgcatttggggcaaagtcactaggcctcatggtaacagcggtgttgtccgttctaagttcacttcaaacctaccacccaagtcaatgggagctagagtcagagtcttcatgtaccctagcaacatatgaggaggatagatttcaagaagtatcggaaggaatcgccattatcatttctcaggagctgtagtttatctattcacttttgttctaaactctctgttggttttgattttatctttagacgaagtaaaacatttttcttcttgagataatattaatggaacttcagaaaaaaaaa

SEQ ID NO: 731 - DNA, 537 bp, Arabidopsis thaliana
aaaacacaagaacctgttatacaaaaactcatttcaaaaaacagattttgttgagatatgagtgcagactggggacctgtgattgtagcagtggctctgttcatcctactctcaccaggattgctatttcagctaccggcaaggacaagagtgatggaattcgggaacatgagcacaagcgggatttcgattttggtccacgccattatttacttctgtatactcactatcttgatcattgccatacaaattcacatccatttctgatcatgtagtgtaacaaagacagcttctttggactcaacttcgccttcatctattttttcttttctttttgttcctaatctctgattcttggctcatagggtctcaagcagggaaatttaaaaaggttgtacacaaataaataatcggtaattttgttttccacaattcaaatgagataacaatatcctctgatctctcgtagcttcagcatgtaataacgtaacataaagcatcttcatttagttacaaatttggtttgttcccacaaaa

SEQ ID NO: 732 - DNA, 537 bp, Arabidopsis thaliana
attatccgcctagatgctgtgagagcaaatgacgaatgggtgccctactcaccaactcaagctgctgtttctgagacaaaagcccggggaatagccattcaggttggtctcaatgactatgaccacttggaaccctgccggatatttcacgcagcccgcctggtcgggatccttgaagcctacgcagtctatgatccagaaattggttactgtcaaggaatgagcgacttactatctcctttaatcgcagtgatggaagacgacgtcttagcattctggtgctttgttggcttcatgagtaaagcacggcataatttccggttagacgaggttggaatcaggcggcaactctcaatggtatcgaaaatcataaaattcaaagacattcacttgtaccgacacttggagaaccttgaagcagaagactgcttctttgtataccgtatggttgtagttctgttcagacgagaactaacctttgagcagacgttgtgtctctgggaagtaatgtgggcggatcaagctgcaatacgaact

SEQ ID NO: 733 - DNA, 537 bp, Arabidopsis thaliana
  misc_feature (1)...(537): n = A,T,C or G
ttttttttttttttttttttttttttttttttttttttttttttttttttttttttttttttttttttttttttttttttnnnnngatatgtagaatagttgaatgtcttttgattctttcattggaaacaacaacacattatattgaatatgaacaaaaagctaaatgctatatacaatagacttctttttgggttgaaagtcgttttatttatttggtaacaacaacacagtgggaaattatgtattacagagtagagacacatattcctgtttaaaatgaggaaacaagaagatcatctgaagtagtaatacctttaactacgttcctgtctgaaggtaaaccagctacaacaccatgttcaatgccacattcgtttgttcctctcctgatcttgaagtacccatcatcaccccagcttcggttccattgatttgcaagcaaccaataatcttcaccgtcatcagaagttccccagccaataagtttaacagcatgacctccaatgttagtacctgttatgtgcggacgcgtgg

SEQ ID NO: 734 - DNA, 537 bp, Arabidopsis thaliana
ttgaatcttaattgtgtagtgagcaagaaagaagcaaactttaatacaaacccataatagtcttaggattaataaagtcacaaagataaaactttgcagagatatcttaatgaccaaaccataaaaacacacacagaagaagagaaagaccaacgtcgccggcaaaactaccggaaaaatcagccaattattacatataagcaaacctaacataacattagggttattacagacttagggtttatgaagttcttcatttgcaggtacaagggttgcacttgcagtcagatccgcatttgcaagcatcattctcggcaacgaaagtctcgccggaagcctcgtactgagagttcatcgccggagcaacaccgaggacaagagtctcggtggcggtgttctccaagtcagggtaccttttgcaacctccgcaaccattgccgcacttgcaggcagatccacaaccacagcttccaccacagcaagacatgttttttctagaaaattggaagagatctgagaagatttatgaagatgatc

SEQ ID NO: 735 - DNA, 537 bp, Arabidopsis thaliana
ccaagagactactagcatacacgagtatatggcccagagaaacaatttccataggaggattattacggacttaaaaagaaacaacaagggaaacagtgattacaacacaagattttaaagatgctgacaaacaaacaaacaaaaatctcacgggaagtggaaggtgaacgaataggagaggagagaaatggccataagagtcgtatgagacataacaaattagattaagcttatcctcagcggtagcttcgatacgaagggctgtacatgctgctctcagcacactgctccagctccttgggctgaggcaacctcgtggccagtcccagttcgtaggccttggcagccaccttagctgcaatacgagctgagatttttctgatattcctgaagggagggtatatcatccccttctcatagtgttcctccatcagttcctcagccaaagcttctgatgctgccagaagcatgtcatcatggacacggatcgtccctgacattattagcccgagtccaaacccagggaagatgtatgcg

SEQ ID NO: 736 - DNA, 537 bp, Arabidopsis thaliana
acaagaactaaactactactagtcttcaccaagaataatatatcaacacacatagtatactcttcttggaaggcaaggaacatgaatcaagaagctgcgagtaaccttggacttgatctgaaactaaatatttcaccgtcgttggattcatctttgctcactgagagttcatcgtcatcgttatgctcggaggaagctgagggtggaggaggagaggctaaatcaatggtggtcgttggctgccctaattgcatcatgtacatcatcacttctttagagaatgaccctagatgccctagatgcaacagccatgttttgcttgattttctcacaggaaaccatagcaagaagagcactagttaaaaaaaaaaataaaaaaaaaatacataatattaaattaaggatgttcttttatttttctttcttttttcttttccttaatttgttgccacatttattgatagtttgaattaatccacaatgaacggatatgttcataaaatcgaaacctatatacttatgtttttaaaaaaaaaa

SEQ ID NO: 737 - DNA, 537 bp, Arabidopsis thaliana
ctttttttttttttttgaatcacataattgtcaattaaggaagataatccaaagtgacatttgggaaaatcaaacagaatacactctaaaaaaagaaaaggtttacatataaaaccttttcttttgttacttgtaaaccaaaaccagagcgaaacaagaagagacccctattgagcaaaaacaaacttgtgaaaatcattaactatattaccttccttctttctttcgtacttctcttgaatgtttttctgaatcaatcgatctttaccgaggaatagatgagtcttgtgaaccagagacaagcgtagaacccgattgttccggtcagcacgaaaaacgcgtaagaggcgatgagcatgtatccaaagtagagcatagctgagacgagcttagtgatctggagctttgtgaagaaatagaaggctgcgtagaggaagagatagaccgcagaagagcctgaggtgaggtaagacctccaccaccagagatagtcttcactgcaaagctggaagtagcagagaacaatggtgatctcgg

SEQ ID NO: 738 - DNA, 537 bp, Arabidopsis thaliana
tgaatccatccatcaccgatctctaatggcggcaccaccagcatcatcctcggcgagggaagagttcgtgtacctcgcaaagctcgcagagcaagcggaacgttacgaagaaatggttgaattcatggaaaaagtcgctgaagccgttgacaaagacgaactcaccgtcgaagaacgtaatctcctctccgtcgcttacaaaaacgtaatcggcgctcgtcgtgcttcctggagaatcatctcttccattgaacaaaaagaagagagtcgtggtaacgatgaccatgtgaccacgatccgtgattacagaagcaagatcgaatctgagttatcgaaaatctgtgacggtattcttaagcttcttgatactagacttgttcctgcttctgctaatggagattctaaggttttttaccttaagatgaagggagattatcataggtatttggctgagtttaagactggtcaagagaggaaagatgctgctgaacatactctcaccgcttacaaagctgctcaggatattgctaatgctga

SEQ ID NO: 739 - DNA, 537 bp, Arabidopsis thaliana
ttttttttttttttttgtgatgaataagaagatgtttatttgattatgagtaaatgagtaattaatttgggaaataaagaggttctttgtgagcaatggtctactcttgtgtgcttaaatcccttttttcttgaaatccatatttactagtctctactcccctaaaagaaccttattaacgagcatctcaaagttcaatttagaagaaccatgcttatgctccgtcgcttcattcgccaagcgccgccactcttccgccttctctctcatattctttcccttctcttcatccatcaactccctaaccaccgcctcaacctcttctctcttcacatctccaccaatctcaatcccaacctcccattcgtcacgagaaaacttacaattagtttgttgctctgcaaaaaacggccaacacaccattggaactccaccgcatagactttccaacgtcgagttccacccgcaatgcgtcaagaaccctccaatggccggatgagaaaggactttctcttgaggacaccaacttgccaacat

SEQ ID NO: 740 - DNA, 537 bp, Arabidopsis thaliana
  misc_feature (1)...(537): n = A,T,C or G
cttttttttttttttttttttttttactaaagtaatataactgtgtttggttcatgaatgtgacattatcaacaacacacaccccgaagaaaacggcaaattactggaaaagtcttaccaaaaaaaagatagaaaaagcatatgagatacacttaaccttaacccaataaccattctgtttaaacttttcaaaagacacatctaaactatcttaagcttgaagtcgtcttcacttctgaatctgatcaagtcttgaccaaaacaacacagagactacctgttgttttacatcatacaacaacaaaaacgacaagtcgtttcccccaaaaagagcaaaaaaacatgtacacactaattcaaacttaaaaactcacttgattctgatcaaagtatctaattagcctaattctcaaatttcaaattaatcatcatccagatcttatcttatacaatataaattaattannncattatcttcttcatcaagccactcccattatactatctccattactcgacatcgcctcgaaccccgag

SEQ ID NO: 741 - DNA, 537 bp, Arabidopsis thaliana
tcgcggccgcttaaaatttacatttccttagttgcaaattaaaagacacttgtattggaaaaactagatacaacctcaccacaatgtgaagaacacaacagtcaaatatttggtaagaccaaacacatcagtaacacaaaaatctagacacaaacctcaaaagcaaacataatacgccggtatcagattgaaccaaccaaaactgatagtgaaagaaatcacaaatcagaagaaatcaatttccaaataattaccagaaggcttcacatccacagtaggaggcttatcataaccaacatgtccatgtccttgactaaaaccatgacgaacactgtgagcttgatccattggtttaaccggttgaggaatctgtggtggactggtgcatctgatcaaagcccaattcacactttggaaaaacggatgctgcttaatctcagtagctcctcttctataagccaaccgatgctgaggctctttcactagcaatcctctgatcaaatctctagctgcaaagctcacatttggatgctcggg

SEQ ID NO: 742 - DNA, 536 bp, Arabidopsis thaliana
ccacgcgtccggtgaattgaaagcacctggtggctcgagtttggaccttaatatttatagccctaatgcttcatcgacaagtactaaagttccttgtaatagcacattatgtacaagaggtgatcgatgcgcttcccctgaaagtgattgcccataccagatccggtatctttctaatggtacctcttctactggagtcttggtggaggatgtacttcacttagtttcaaatgacaaaagttccaaagctattcccgctcgtgttacttttggatgtggtcaagttcagaccggtgtattccatgatggtgcagctccaaatggtcttttcgggcttggcttagaagacatatcggtgcctagtgtactagcaaaagaaggaattgcagcaaactcattctcaatgtgttttgggaacgatggagctggtaggatcagttttggagataaaggtagcgtagaccaacgggaaacaccattgaacataagacaaccacatcctacttacaatatcaccgtcactaaaataagcgttg

SEQ ID NO: 743 - DNA, 536 bp, Arabidopsis thaliana
tacccttcttcttcctccttcccatcttcaacacctatcctatctccgcctccttccaccgctttctccgtcatcgtacctcgtcggagatgtctcagattggttacttcttgtgtctccaccgttcaaagctccgtcgcaacaaacggttcctctccagctcctgctccggccgctgttgtcgttgagcgtgaccagattcgtcttggtcttcctagtaaaggacgtatggctgctgatgcaatcgatcttctcaaggactgtcaactgtttgttaaacaagtcaatcctaggcaatatgttgcacagattccccagttaccaaacactgaagtctggtttcaacggccaaaagatattgtcagaaagttactctcaggagatttggatctaggtatcgttggtcttgacacacttagtgaatatggtcaggaaaatgaagatcttatcattgtccatgaagctctcaactttggagactgtcacctgtctattgcgattccaaactatgggatatttgagaatataaattctct

SEQ ID NO: 744 - DNA, 536 bp, Arabidopsis thaliana
gccatgcagcaacaacaacaactacaaatgtctctcatgtccaatcccatgggtttagggatgggcatggggatgcccggtctcggtctcctcgaccttaattctatgaaccgagctgctgcaagcgctcctaatatccatgccaacatgatgccaaacccatttttgcccatgaattgtccatcgtgggatgcttcttccaatgactctcgatttcagtctcctctcatccccgatcctatgtctgcctttcttgcatgctctactcagccaacgacgatggaagcgtatagcaggatggctacattatatcagcaaatgcaacaacaacttcctcctccttcgaatccaaaatgattattactcaaacacctctatatagtttacgtctatatatgtgttagtcacatacatacatatatatattccatcataattatttatttatatgtataggcttctcatgaattatgatattatacgtattacgtactttaaaaatatgtggtcgtaattggatagagaaaaataaataa

SEQ ID NO: 745 - DNA, 536 bp, Arabidopsis thaliana
ttcttcatcatcgcttttagttctctcagtggagaagaagactcgagtcatctgcagaaaagattcccgatcggattggatcatataagattttagggatttggaaaaaatcttgagctatggaggcgaatgcggcggtggacggaacggggaatccgatccctacgtcggcggttttaacagcttcggcgaagcatataggaatcaggtgtatgccggaaaacatggcgttcctgaaatgtaagaagaatgatcctaacccagagaaatgcctcgagaagggacgtgacgtcactcgctgtgttcttggcctgctgaaggatcttcaccagagatgcccaaaggagatggatgcttacgttggatgcatgtattactacaccaacgagtttgagttgtgtcggaaagagcaagaagcttttgagaaagtgtgtccgttgaaatgagaaagtcaagtttttatctgtctcctaataagcaaatgttcattttgactctggagcgttactctaatcactcttccatcgctgcctgct

SEQ ID NO: 746 - DNA, 536 bp, Arabidopsis thaliana
cggccgcggtctagtttacacagatcaaacacaggttacaacatccggacttgtttccttgagaattttccagtgcaggacaagccatccatcaatctattatatgtaaagatatcaggcaacatatctttatccaacatctcgttcactagaacttctccttcctttcttctcccttctttcgtgaaccccgaaaccaaaacatggtacgttgtctcatcgggttcatatcctttgcttgatgccaaaagtctcaatctgtttgcatcagtagaatgatcagaactgcagagatcccgaagaagcaagttaaatgtcacactatcgggaagaattcctgcattcatcatcttctccataaaccctgacgctttctctgttcttcctgatttcctcaacccttcgacgagtgtagtacaagcaatgaaacatggggtttggcctttcttccacagctcctccatcatctccattgctctaaccgccttgttttctccgcagagtttctcaaccaaactaccataatcaaactcact

SEQ ID NO: 747 - DNA, 536 bp, Arabidopsis thaliana
  misc_feature (1)...(536): n = A,T,C or G
gaatttgaattataaaaaaaaagaaaccccttaaaaaacctcaagcccatacaaaaccccagcatgtttctccggcccatcttgaacaaaatacaaatccctcatcctctgaaacgtatgccacgtaagcaaactatccgaaccagcttgatgacatttcccaaccgcccggttaacctcaagcgtccttgcaacccggtccaaaccaccaaacaatctcctttcacaaaacttcatcatatgcttcacatcatacacacgctccccaaacaacactctcatcacgcgcttaaactcccccaacgcgccgggcaattctcggcgcgtgagaatcttcatcaagtaaccgaaatcatacgcgctatgaaacgtcacccagctcacttcctcattacaaacaagccccgacgacatcatcagctccgcaaacctctccgactcaacaccgtcgcgacaattccgctcaanatcgataccttgccgacgaagcaactcgatcgaatcaggcgcgtgtgcgtcacgcgccacgtcgaagt

SEQ ID NO: 748 - DNA, 536 bp, Arabidopsis thaliana
tcgagcggccgcccgggcaggtacaataagacatgttgatatgcacatccattcttccaggacgtagcagagcaggatcaagccgttctttgtgattcgtcgtgaacacaatgattctctcatctccgaaactcgaccataaaccatcaatgaaattcaaaatccctgatagagtcacctttcccttaatttgttcatcttcttgattctcagcttccctatctctcacttcagcattacaatcaatatcctcaataaccaaaatcgaacgattcgtcgtagataacaaaaccctcttcaactcaccattgtcataaatactactaagctcaagatcaaacacatcaaacttaagataattcgccatcgcagcaatcaaactagatttaccagttcctggtggcccatacaacaagtaacctcgtttccaagctttaccaactcttttgtaaaactccttcctcttcaaaaacctctccaaatcatcgatgatcttcttcttcgcattcggatccatcgccaacgtatcgaacgta

SEQ ID NO: 749 - DNA, 536 bp, Arabidopsis thaliana
ccacgcgtccgagcacacaagatctttaatatggaagacgaaaacaccacaatcatcatggcgtcactctctgctctttctccttcacacctcacgaatctgactcactccattctctctatctcccaccaccatcgccgccgcctcggtgcagtcctctcctctccgacccttttctccctcactctccgccacctcctctctctatctcttcctgacaaaactcacctcatcgccaaccatcttctctccctcctccatcctcttctcatccaccgtaaacaccactcctcctacgccgtcaccatgaagctccgggacctagacgcggtggtcctcctcctctttctctgcgaaacccaccagcttcatccagatgttctagaagcttccgctgataattggcgggaaattctcggtaatacgtactctaataatatgttaagtaataattccggtctttggacttgcgatgccggaatcttgatgccgtacatagaaaccctagttagatgcaaaagatttgttgacataat

SEQ ID NO: 750 - DNA, 536 bp, Arabidopsis thaliana
ctttttttttttttttttgcacgatcacatttcacatatattaaatttgagttgtaataaacaaaatgacattaaaggcgacaacaacaatatttttaaaaactctagatgtaaaaaacaaaattcaaaataaaacgccatgtataattgatccaaacacaattctcacatatagccggataggaatataggctatagtctatataaagcactccaatggttaagaatatataattcaattttaataaaacatcgcagcaatcgtgatcacgacgattccgaccaagcctgttcccgcgagtttgcttgcggcatccttgtcagatttgggtgctcctggaacaggtgctgccgtcttcggcaaaggagcttgggcggcagtttcggaacacaagttgggatcagtggtgagtccacaagttttggagaaaagagcattgaagtcggtgacattgaaagggatcaacaacattggacttttgatgaaaccgcaaagacaagacagctgagtgttcaacgccgtctcggacgcgtgg

SEQ ID NO: 751 - DNA, 536 bp, Arabidopsis thaliana
tttttttttttttttttttttttttttttttgtccccaataaaagatattatttctaattgtacaatttccatgaacaaaaaaaagatccttaatttgaaaacacaaaacaaaaaaaaggtcaaactcttttttgcctcaagcggccaaagagatttcaatgagaaaacactaaaaaagtcctaaaagaagacaaagacacaaaggagaaaggattcttctaacggctcagcttccgattctttttcagtctttctctcctttcttcttcctctaagagcttaagttctctttcatcttcctcccttgcgattctcgcacttcgtctctcttccttttggatatcttcaaagcctgcttccatgtttatgtcatcatcgtcataccgagaaaaccgcttgggtggtaataactgtctaagcatatcgaatgcttcttgatcctctgaccttgcaggcttcttcttcttcaacagcctcctttcatgatctatgtcacgcgagggaggtctcttgagcgctggtttactcatcatct

SEQ ID NO: 752 - DNA, 536 bp, Arabidopsis thaliana
ctttttttttttttttttttttcaataaatgtactctacaaataagtaggaagcaaaagacgatagaaattccttcatacaatggttagtcactccggaagagttgggtttaagagaagagaaacagcaccaaaagatcactggttgtttaatccacaagcttattactttttaacattctttatacaaagataaacagacctctctacttgagctgacccatgtgatttactgactttttaagattcctcagtagaatgatcagggtttcttcgtggactcaatgttcttggcaaattcttccatttgctgagcgactttctccctgttctctgcagccaatttagagaggttttctattctctttgaagtcctcacagcaaatctctggaaagcatgactgtttgccaaaccattaactatgaactcgttcgcaacgtatgagatcactctcgcaataaagtttcctcctcccgccattctcgctctttcctgatgcaaacgaagaggaaggttcgagacccacggacgcgtgg

SEQ ID NO: 753 - DNA, 536 bp, Arabidopsis thaliana
aagacaatccaaggaggcttttatgttaaatgctatagacatacaagcaacctatcctttggctatgcagcttcttcctcttgtctctaccaaaagtaaagctgctttacgcagttcagactccaacaacaaaatattacatccacagatttaacttacacatttgccagatgactactaggcattaggcaacagtatctgacagagagactcaatatgtgcgatgtgatcagaaaggagtttaggctttcacctcctcaccaccaccagaccctcctgcttcctccttctctgaatcctcttctttcttttcctcctcctcctcctcatctgctaatttggtgagctcctcttggattatcatctttatagatgactttcttggagtgagatcttctgtgaactccttagcaagttctttaaggatgtccgtgaacgtagccgtactaaagtccactcttttcaagatctcaacgattgcatttttcagcactttatcactcggcttgtctttcccttttccagccctttttact

SEQ ID NO: 754 - DNA, 536 bp, Arabidopsis thaliana
ccacgcgtccgctttttgacatcaacaacgattttccccagctgacaagtcgtcctgggtctgctggtggcactcaaggacatctaggctctttgaggaaacaaggtttaggagttccacttgtccaacaaaaccaggagttcagcatccaaaatgaagactttcctgcccttcctggatataaaggtggtaattctgagtatcctatggatttgcatcaaaaagaacaactgcatgacaatgctatgtcaatgatgcactctcaaaacttttctatgggtagatctggtggtttcaacttgggagcaacatattcatcacatcgtccacaacaacagccacaacatacttcatctactggtgggctacagggtcttggccttagacctctaagctcgcctaatgcagtttccagtattggttatgatcagcttattcagcagtatcagcaacatcaaaatcaatcccagttccctgtgcaacagatgtcatcaatcaaccaatttagagattctgagatgaaatcgacacagtca

SEQ ID NO: 755 - DNA, 535 bp, Arabidopsis thaliana
  misc_feature (1)...(535): n = A,T,C or G
tagggttcttactcgataatattttgggagtgtcgtatttgaggagtcctttagtagattcttggagggtatcaactacgaccttagggagaggaaacttcttaaagatgtcatcttgaaaccctaacttgagtaacaagccttctttataaagacgatcgatctcgccgaagtctgcaaagtcctcagctacaatactggctttgagcgacggaattaggtggtgtaagactgctttnancctccctgcagcaaaagtgtcctgcttcgactcttcaaattgctcgtctcgtggcacatacataggtaatggcttctctactcggctctccgcgtctttatcagaaactgttgattggcgaccagtacgacaacgtctagggtaaggaacctctttgccaccgagtttggggcgagagagctcggatgatttgtcgggatttccaaggtcgttgtaaacatcaaagtcgtaaattctgtctgataattttctcactccacttccatctcctcgtagattcttcaactctttctc

SEQ ID NO: 756 - DNA, 535 bp, Arabidopsis thaliana
tttttttttactatttttacccctaactgtttccctttccccccgccaaaaccagttgagacatatttacatctctacccttttccacagtccactgtaacaacaaaactccaatctctgttttacaactctcatactgccaaagtaatagttgtcggcagtaaatcaccggcgtttcgttcaccggaatcttcatctagctcgagccgagcaaccgtacagtcaccgtaagtaccagaagacgaaactcgagccttaagttggctcaacaccggaacaatcgctttctcaatccattcctctaactctgtttggcctaaccacactccactcaagattctctgaagtgcctcttcctcgacttctactgatagtgattcgcctatgatcgtttcgaatctctcagataatgtttctgtgattctccgtctcacagctgcgaaatcaactgctcgaaacgctaccgcatcatctacacggctaaccatatcgtggaatgcaaatggaacgcattgtagtgacagctttccactaa

SEQ ID NO: 757 - DNA, 535 bp, Arabidopsis thaliana
tttttgacctcctttatcatttgaacaaatgtcaaacaggaatacttaaaaaaccttggaaatgataatcgtgatccgatcagaagatcttggaatttaaagaaaatcaaatatcttgagactagattttcaaacagaggcaagatgatatccagtttcctttagaaatctcagcttcgtcatcataatcattcgctcgcaacggcaggctcagcttcggttgcataatcgtgttttattttacgagcaagctggtatatgcctgtccctgccatagcaacattaacactgaagaggttccagtttttcggattgattaccatgctgtaacgagaccaaataacaccagtgcatgtaaccgcgatttgttgaggataggaaagtttctctggaggtttggcaaagtctgcaatgttggcaatgctaataccccacttgaacgttggtgcccagaaatgaatggttttaggtccggcagggtgattccagatagcttgaagcttcgaagtcgccatcgaaaagttttcccagttcc

SEQ ID NO: 758 - DNA, 535 bp, Arabidopsis thaliana
gcggccgcccgggcaggtcggaggcttccttcttccgagcaagaacacaagaagtagagtgagagcaccaccagtattagcaatcatcatggttctgcacacagaagcaatcaacctaaagagggatgcagccatttgttgaatcagaaacaccagaagaaactgcttgaagaagcggctggcgtcaggtgcaaaaccaatggagtaataagtcaccaccatccaagccgtcgattctaatattgagcttggaatcccaagcaagaaagtgggaagtgagaaggtccaggatggataaaacaagagatccctctgtttgtagaacacagggagtcttgaaaccatcatagccatctccgcaaacccattaaacatgttgatgatcattccaaatagcaatgctcctatgtagagattagcatcaccctcgtttcttgtgttcatttcggttctcaggaagagtgtagacgtgattgcagcaatgatgacgatctggacagtcttgaaaacatagaagaacgcgtttcgctgcata

SEQ ID NO: 759 - DNA, 535 bp, Arabidopsis thaliana
  misc_feature (1)...(535): n = A,T,C or G
ttcgcttcgattctcaagatccttaattttctccaagctttcatcggtatatcaatcataatctactcgatttggatgctcgatcaatacaatcatcacgttcccgttgaccctcctccgtctcagcctccggcagcttcatcaccggattcttcttattccttctctaattcaataattgagatcaacagtgtttctgattctttgaagaatccgatcgatttcgtatcgggtatcgttctcgggtctggtggtggagattcgggtttcaatctccgttctttagatcttcctgctccatggtttatctactgtttcatggcgattgggattttggtctgcattgtcactatcattggtttcattgcagctgaagctatcaatggatgttgcttgtgtttctattcaattctcaaaactcttttaatcattatcgaagnnnctctagtgggattcatagtgattgaccgtcactgggagnnnnatcttccttatgatccaactggagaactcaatagtcttcgagctttcatcg

SEQ ID NO: 760 - DNA, 535 bp, Arabidopsis thaliana
cttgaggtccgtttcgtacctccgtcaatctgccgttacctctccacctccgattttctccgccgccgcttcaaccgttcgccagttcacttccgccggctatccttccaacagttttcaattgacgccgccgacgaattggggaatccggatagttccggagaggaaggcgtttgtgattgagcgattcggtaaatacgctacgacgttgccgtcggggattcatttcctcattccgttcgtggatcgtattgcttatgttcattctctcaaggaagaagctatcccgattccgaatcagactgcgattactaaagacaacgttagtatccacatcgatggtgttctctacgttaagattgtggatcctaagttagcttcttatggcgttgagagtcctatctatgctgttgtacagctggctcagaccacaatgcgtagtgagcttggtaagatcactcttgataagacctttgaggaacgagacactctcaacgagaagatagtggaagccatcaatgttgctgcaaaagac

SEQ ID NO: 761 - DNA, 535 bp, Arabidopsis thaliana
  misc_feature (1)...(535): n = A,T,C or G
ccatttctccctctcgtgacaaacgcaatttgcagagaagcaacaacaacaacaagaagaagaagaaaaagatttgagattactttgtatcgatttagctattcgagaaactcttgccgtttgaaagttttaattgttaaagatgtcgagttctatggaatgttctgagttcgtcggtagccggagatttactgggaagaagcctagcttctcacagacgtgtagtcgattgagtcagtatctaaaagagaacggtagctttggagatctgagcttaggaatggcatgcaagcctgatgtcaatggaactttaggcaactcacgtcagccgacaacaaccatgagtttattcccttgtgaagcttctaacatggattccatggttcaagatgttaaaccgacgaatctgtttcctaggcaaccaagcttttcttcctcatcttcctctcttccaaaggnagatgttttgaaaatgacacagactaccagatctgtgaaaccagagtctcaaactgcaccattgactatattctac

SEQ ID NO: 762 - DNA, 535 bp, Arabidopsis thaliana
  misc_feature (1)...(535): n = A,T,C or G
ttcttttactttcttgcaatcactgactataaagaagagatgattgtgtgtgagaaatcgagctgttgctgatccttcttcgtgtttcgaaactcttaggtttagtagtctccattgggaatctaggaacgtaactcggttgtgtcttgttcatgctgcttcttctgtctaaatcaccagaaaccataacagatttatgactcttgcagctcatcaagaaaccattccctccgctgctgctactagatttccgtctctgcggtgctgatttagcggtaatagggattcgaggaatctgagtaggtcggtttcttcttacaggacttgttgcacattctgacataacagagaaatctgctgcacttgctgtcactatgctccattctacgcttacttcacttggcgcataacacgtaggtgaagctggatcacttccttgcctcgtaagaaaaggtttaggnnnncctgtaagaccctctatctcgaaaagatccgagcttgaatcactcccttcactctttctgtcgtcctcctc

SEQ ID NO: 763 - DNA, 535 bp, Arabidopsis thaliana
ctctgcttcatctccttcggtaagatcgagaagcacatccacaaaatctctctcccggacatctttagagttagtatcccgcaatgatttttccgctaatttagcatcaatgaacccacggaaaaccttaaacaatctctcggaacaagccttcagagtctttctattaccttgcagatcaaggaaccccagaaatggaaagaagttagcagcgtctggattcccgacagcttccatgacaccaatcaccgtgtcttgaaacccaccggatttattcgagtcgtagttaccgagatcgacagaaaacagaatgtttgatatgatattaagagcagtgatgaaggtagcacgagatatatcaacagcttcttctctctcgctgctttcactcatgaagctcacgagttccttcaccttgttctccctcaacgttttcgtggcttcgatacgctgaggcgagaagagctgagtcgccgacagttttctcaaaagtctccaacgagacgacgatggtggaagccagacaacggaaacc

SEQ ID NO: 764 - DNA, 535 bp, Arabidopsis thaliana
  misc_feature (1)...(535): n = A,T,C or G
tttttttttttttttttttttttttatgtagaattatagattatgtatatacatctctcacccactgatacattacttctttaaactacaataatacaaactttctttagctacaatttctttacttaaagcttatttagagaaaccctttatatacaaaaaactaattggatgcttataagattttaaagtttatacatagatatataaaacaaaactagtttctaatgagatgggctttatctccttattcttcatgtttcttccttttgcttagtctccttcctttgagcccttttcttgaaccattctatttcctctcctctgttttcgcaaaccttcctcggactctcggttggctatctgcaagagctttcctgcaagcatacttaatcttacgcccgaaatttcgcctgctcttcttgttcttgtatcgagaaagcttctcacggcgatcttctgaagtgcagctcacaataatcntatctagtggagattgaacaagacctgccccaagtttctgccggacgcgtgg

SEQ ID NO: 765 - DNA, 535 bp, Arabidopsis thaliana
aaagaaagtgggagataaaattaacaaacaaacattctgagttacaaaccatattaaaagacacaacaaaggagacaaactttaacaaaaacaaaccatcttagacaaattctttaagaactaagctacagagaaaggaaatggagaggtaaatgataaataatggttcatcggataaatatgaatttactggcaaagctgctcgacagcggtcacgatctgagccggttgaaccacggtccactcctccagtgtaccagcgtaaggtgtaggaacgtcttgagaagataaacacatcaccggagcatctaagtagtcatgaaagttctcgttgatggcagctgtaagacttgccccaatcccaccggttctcatacactcctccacgatcaaaacccgatgtgttttcttcaccgagtttccaattgtgtgaaggtcaaacggtttcagtgacctgatgtcgataacctcggggtcataccctttgttcaccagagtttttgctgcctgcatcacatggtacctcattcgcgag

SEQ ID NO: 766 - DNA, 535 bp, Arabidopsis thaliana
  misc_feature (1)...(535): n = A,T,C or G
agattcgcataaacaaattcgttccctaaaatcaaaatctcatagcaagttgtaacccatcaaaactagcgaaaacagatacataggttcaaaagaagaagagctttgagttgcaatgcagacaatgaaatggtccttcttgaaggacatgatcaactctattcttctcaagccacaagagtgcttgcagttgtagactcgtacttccagacgggtgggagcttcttggtcttcttgtagtaacgagcaagacgatggattctgctctctacaagaatcagcctgaatttggaatccttatctttcctgttcctctcaagatgcttgcggatagcaacagctttcttgatcaagtgatacagatcctcagggatctcaggtgcaagaccatgagctttcaaaattctnngaatcttgcttccagtaacacttttcacctgtggaattccgtgagagtcacgaagaatgacaccaatctgcgatggggtcaaacccttcttcgcaaacttgcagatggactcatcaacatcttgag

SEQ ID NO: 767 - DNA, 535 bp, Arabidopsis thaliana
aatcctgcaaaccccgagattcattaccgaaccacgggaccggaaatatggagagattcagccgggaaagtagatatattggtcgctggcgtagggactggtggaactgctactggagtagggaagttcctcaaggagcagaacaaagacatcaaggtttgtgtggtggaaccagtagaaagtccggtacttagcggaggtcaaccaggtccacatttgattcagggaattggctctggtatcgtcccattcaatttggacttaaccattgttgatgaaattattcaagtggcaggtgaagaggctattgaaacagccaagcttcttgccctcaaagaaggattactggtgggaatatcctctggagccgcagcagcggctgcgttaaaggttgcaaagcggccagaaaacgcggggaaactcattgtggtggtttttcctagtggaggagaacgttatttatcgactaaactgttcgattcgattagatatgaagcagagaatttgcctattgaatgaatgttggacgtgtgcc

SEQ ID NO: 768 - DNA, 535 bp, Arabidopsis thaliana
gcttcatcgtcgaagaaaggaggatcaaaaggaggagacaaagacgacgcagagtcaaaacagaggaagagattaaaaaccctagctctcgataaccaattgctctctgattctccggcgaaatctcattcctctctcaaaccttcaaagcaagttctcaaacaccatggcaccgacatcatccgcaaatctcagcgcaagaatcgctttctcttctccttccctggtcttctcgctcctatctccgccgctaccatcggcgatctcgatcgattatctaccaaaaaccctgtcctctaccttaatttcccacagggtcgtatgaaactttttggaacgattttgtatccgaagaacagatacttgactcttcaattctctagaggaggcaaaaatgtcttatgtgatgattattttgataacatgattgtgttctctgagtcatggtggattgggacaaaagaggagaatccagaagaagctcgtcttgatttccctaaagaactagctcaggcagagaatactgagtttgatt

SEQ ID NO: 769 - DNA, 535 bp, Arabidopsis thaliana
tttttttttttttttttttttttttttttttttttttttttttttacataaatagggttcatagaattggggagaaagtttctgactttttgaaagattttagaaagctaatttaaagcttgccgcgaggaccgagcttaggtggctcttgaggacctctcttaatcggaagaacatcgccggtagagttcgcactaacatatgtaagcaaagagcctcctccaagaatcaaaaatttgagaagcaaacctctctttgtgaaaggagcagcaaatgtctcaaagaacttgctctgaagtgggttataaggagaaggagcatcagatccatacacatcccattgtcctgttgtgttacccaaatcttctaaatcaaagtatacacttttgtctccatacttagccaccacagcaccagctctggtggatttggttttgaagctttggcgagaaggtttgatgaagagcttagctccggcaagagagctacctccaagtcctttcacggcggcagaaggttgtacggcggcgatggt

SEQ ID NO: 770 - DNA, 535 bp, Arabidopsis thaliana
cttttttttttttttttaagagtttgaaaaacaccatcatagttcttaaaaatcgtcttaccaactcaacaacataaaatcccagataaatccaatacaaacgaagaacataaatcagaaaaccaaaatctttgcctagatataagagactttgcgatgacgagagcatcattactgactagcgccaagccacttggtgaagttatcgaactcggtgtagtcactgtctgaaatcatagtctgataccaagccttgcctgctgctttgatcgcttgggcctcctccttagtgacgactttcctcttcttctcgagcttctccttcttagccttaacccttgaagcttcagccaacagagacattctctttgcggtcttagcataaggattcaacttgaacatcacattaaggttcttcaatggattcttcttcagaaccgctctcttggaaccatccttaatcgggttcaccacactctgtacctcatcggagttaataatcctagcaagatcagcattcaccatcttcgcacga

SEQ ID NO: 771 - DNA, 535 bp, Arabidopsis thaliana
  misc_feature (1)...(535): n = A,T,C or G
tcgagcggccgcccgggcaggtcggaatctgagaagccataaatcagcagaaaaaaatcttaaggatcggaaattttataatcggatgaatagagtgattagtcagttttccggtaagttgatgaaggagaagagtgttaccggtgtaagcggcggagatacgactttaagatctgccgtcaaagaatcggtctcgtctccacagagtgcgtcgtcgtcgtcgtcggtgaggaggcttaaaggagatctggaatcgagtcgatttggtgcggcggcgagtgagaggctgaggcaagcggaggaatctttgaggacggtgatgtttctgagctgttggggatcttgttagatctggttgagaaaataatagatgagaaaacgaaaccaaaacgtttctgtttgtgtttttgagttttggatttttgttttctctgtgaatagttttttttttttttcgttttctttgtactttgtgttttatnnnaatcatgtataaaatgaaaagtaaatcaatgaagataatggtttgtcttca

SEQ ID NO: 772 - DNA, 535 bp, Arabidopsis thaliana
ttttttttttttttgtctctttaacacagggaagaagctaccttcgtacttgaaatcgaattcgagcggttttgcatcgctttcaaatcgagatagagctaaaaaggtaacacttccctaagaatatcatatatacaaagcactctaaacaattatttcatatagtatcatcaaatcaaaatgctagtaccaatatgaagatctgtctttatcatgaaagagtcacaaataggctctctcatcatactattttcaacatcgtcgaatgaaatcagtggacgacggttgaggttgtagctcgtttgtgttcgggtcaaagccacgcccacgacgcttgttgatcaactccatgagcgatcggtgtagcacctgtgttctcgtgtccaccagcgatctcattttctgttgtagccttactcgtctccgttgttgctgattttgatcatcatcaatggcaggtgagtagtggtatgttgaagaattcagcaacctgttagagcttctattgccatcatccatatctgggatcacatcg

SEQ ID NO: 773 - DNA, 535 bp, Arabidopsis thaliana
tgttctttttcctgtaaaatttacacaacttttttttaccccacaaataaacgaattgtatagataagccaaaaaaaactagacctaaaatgccagttcatccactagaacaagaaacagaatttgagccatagctaatagcttgcaagctcgaatgagtcatatttgtcatccatctccttggaactccgtttgattcaccagccagattatatgcataagatctccacttgtttccaccatctttacaagaactcataaaccctaaccttctcgctttctgtgtcctctcaagaacaatgagactagagaaagtcgaaaagctattaccaacaaaaacatccgctcttaaacacacctcgtaatctatagccgattgtatcaaatatgaatacttcccatatatctcctctttaaccccaagcttcttcttctcaaatggtattaaaccgtctctccaaccacttaaaaccgatgaatcttcttctttttcttctaagagagtatctgctactgcaaggtaaagaactgttgg

SEQ ID NO: 774 - DNA, 535 bp, Arabidopsis thaliana
ccacgcgtccgaactctttgtatttctcccaacctcttatgacccagatgaaaggtctttgggattcctctaggcctagtcccagctcaaggagctgagacagaggaagattacaaatacttccaaggcaaacgtagagcacagatcccggttccttagaatcgagccattcaaggcactcatcttgatcaatatctgatttgtttcccctctctgctttgtctactcctaccttgttgcacaaggaaacaggtccaatggtccatgctttaccagaccttgcctccttgaagtctttggcatacgcaggttcgagctcttgaaatgagttgactataacaccataagatgtcttatccgcttctaccatatcctccaagatctctttccagcctgcaggaacatatgtttccaccggaacttgaggtcttgtgaattcaactctatcaggaaaataaggaacaatgaagtactccttatcagactttaaattgtccaagatctcacggttcttgcgcagaacgttaacacacag

SEQ ID NO: 775 - DNA, 534 bp, Arabidopsis thaliana
  misc_feature (1)...(534): n = A,T,C or G
ttttttttttttttttttttttttttttttttttttttttttttttttttttttctgaaaagaaaatgcaaataagattacaaaaaaaagaaaagaaaaaggtttgcatattaacnagattacagagcacactcgcaattaatagaagaaatacagagtggtctctctagttgagagatcaaaaatggatttaccaaacaaagccaaatttcattttacttatagtcaaacggaggaagatccgagagtcaatggcgatgaaggttgcagagcacgaggacgccttttcctgcttcgaccgcgaacttgaactgaaggagacgaagaagacgacgaaggagtagcaatggtagacctctctctgctcgatacactcgtcagtttcttcttctcattttctgcttcacatgatttgtcttgattgactctgttgtttccaaacctggtcgcgtttatagtcgcaggaagcacacagttgcacatgaagccgattcgggcaaggcggttaacccaactaggaattcggacgcgtgg

SEQ ID NO: 776 - DNA, 534 bp, Arabidopsis thaliana
aaaaagttggaagctcaaggtggtcgtggaggagaagaatgggacgatggtggtgcttacgaaaacgtcaagaaagtgtatgttggtcaaggtgattctggtgttgtttacgtcaagtttgattacgagaaagatggaaaaatcgtatcacacgaacatgggaagcagacactacttggaacagaggagtttgtggttgatccagaagattacataacatcagtgaaaatttactacgagaagctctttggatcaccgatagagatcgtaacggctctaatctttaagacattcaaggggaaaacttctcagccttttggactaacctctggagaagaagctgagctaggaggtggcaaaatcgttggatttcatggaagttcaagtgatttgatccattctgttggagtttatataattccgtcgactacaccgctgactccgccggtatcaggtggtctgaccaaattggaagctcaaggtggtcgtggtggagatgtttgggacgacggtggtgcttatgacaatgtaaag

SEQ ID NO: 777 - DNA, 534 bp, Arabidopsis thaliana
cggccgcatcacattacttgccgcacaagaaaactagtcttcttcgtcagagtcgtttactgttatctcaaacgtaatctcctcaaaccgtccatgcttctcttcacacccgtctcttccacactgcatctcattgaaatccatgactgaacccaccgaggaacggttcgattcggagctgcagaagatactccaattaggaaccaaagaagcaatctctccatcgatcatattagctatctttgtgacatcacggtcatccatctccagctcttccaccatctctcttgcaacgcttattgctgtgtcagtctcgatgtcgaacgggaagtatatgtttctcacacaaccttccttgttgacggttttgagtcgcagaaatagtccatctccattgtctcttctcttccctttaatgcttatatctacactaccaaacctcttatcttcttcttcttcatcatcatcattttgaaactccaagagatctatctcgtgtgactccactgtctcatctccattgtaatcccattg

SEQ ID NO: 778 - DNA, 534 bp, Arabidopsis thaliana
  misc_feature (1)...(534): n = A,T,C or G
tttttttattcctttgatcgaggttgatcctcccatagtatataactatatatccatgtcaggactgatgaatcaaagaaaaagatacaacagcctcatgcaacaactatccattttctgtctaccaaaacttgtcatttcgcattaatttacagtttcagttcgtaaactccacctcttctctttcctttattaaaacccaagaccccactgttttgtgtcaaaagttataagggattccataagccgcagtatccaaccccgctgcaggttcttagtctacaagtagtggcatcaactccgcactctttgttgctccaacacttatgattgatttgctcgtcaagaacatggcaagcactctctctttgttgctcaggatgtctagagttaagagatatcagtggacagacttgtagtgacaatgcgctnnnncgactttcccatgctccactctttgaaagnnnccagttgcctgagaaataagtttctggtagtttctcatgccaggagctcacaacctgtataggatgg

SEQ ID NO: 779 - DNA, 534 bp, Arabidopsis thaliana
ttttttttttttttttttttttttatgaaccaaccaaccatagtaataactctttttttctctactcatacaacaaacaaagggtgcatatcagtttgtgacatattgatacatagagaggtaatttataagaagtgtttgttgtgttcatgctacattaagaggaaatcacaaaccgagccaaggacactgcttccttgcatgctcaggtactaacttagctaccatctccaatggtacacctttcagctcgtgaggcttgaagttgaaaagcggtggaaggaaacgtccattaggtagacgtgcgtttgggtctcttaactcatcaaagaatgggtggactaatgtgtcgagagcggcacttcgtagattaggagagtattgaagaagtcttgagaccaaatcaacagcttctggaggcatgcgtttgtggaaaatcttgtgccatggatgagctttaatctgagggaatttgaattccgtgtagtttgggttcatgcacttgatttcttctctagtaggcgttcccaagac

SEQ ID NO: 780 - DNA, 534 bp, Arabidopsis thaliana
tcgaaacactcactcataaaccctaaatccaaaccaaagatctcgatcagtacaccatcaatatctcaagaagaagtagaagaaaaaccaatcgtccagtcgaataaaagtcatcaaaaccatgtgatgagggatatattcgagttagagactacttgtagtagaaataatgaaagaaagaaaggcggtggcgcggcggaggaggggaggaaatcggtgtctcacgtggagagggatacggcggcgaggatagaggcagcggcggagatgttgacggtgaggatactagctgcggacatgccggggtttatgcaggcacatgcgtttaggtgtgcgagaatgactttagatagtttggagaagtttagttcgaagcacatggctttcaatctcaagaaggagtttgacaaagggtatggaccagcatggcattgcatagtgggatcaagtttcgggtcgtttgtgacacattcgacaggttgttttatttatttctcaatggacaaactctacgttctcctcttcaaaaccaaa

SEQ ID NO: 781 - DNA, 534 bp, Arabidopsis thaliana
  misc_feature (1)...(534): n = A,T,C or G
ccacgcgtccgccctttttttcttttgttgcgacttttcttcttcttcttcctcaggaacttaagtttctgagtccatgaagatgccagtggcattggtctggctactggcattcactattctactgatcagtggggaaggcaataatgccatctgcaaggagaattttaagttagaccctagacctcatagtgtttcgatcctcgagtttggagcggttggtgatgggaagacgctcaacactattgctttccagaacgctgttttctatctcaagtcttttgcggataaaggcggtgctcagctttatgttccaccagggaaatggctcaccggaagcttcaatctcacaagccatctcactctcttcttggagaaaggagcaacaattcttgcatcaccggatccgtcgcattgggacgttgtcagtcctctaccgtcctatggtcgcggaattgaacttcctggaaagcggtacnnaagtttgatcaatggagacaatctaatagacgtagtcatcaccggtgaaaatgg

SEQ ID NO: 782 - DNA, 534 bp, Arabidopsis thaliana
tttttttttttttcctccaaagctattcccagaaaatattctaagaataagtttttttttttgtctcataagttttattaaacatcatcatatcatacaagagcttaaacaaaagctccaactttggaattacataaagcccaaaaaaggcccattagataaccttctgcagaagaaattctatcggaactccatccatgaacacatgtcgacaaccgggatataccacgtcacacgctggatgaataatcaaaagttttccggcaacaaccttcgccgttgagctgattccggtgagatgattcttgtgttttgcaccagaatgaaaacatcaaagctccaaattaaagataacggcttaaggaatcgtgataaacgacggaagaatcttcaatccttcaacaaaagagaaaaatttctttgaaaccattatgtaaatcctaagttcaaaaaacgatccggcgaaacccatcttgaaaactcaaaggatagagagggaaaagaaccatcgaggatatgacagattattacccc

SEQ ID NO: 783 - DNA, 534 bp, Arabidopsis thaliana
atcattttggttttcggatgattaaataaataaatcttacaacaatgatatacatatatacatagatatatacatttttcttaaaagtaaaattatcatttgggagaatatccactaaattccattacctacatcgatcttaatctgctcaacccgtattgttccagaacaaagtagatttctttgagaataggtgtcaacaatgagctcaaggtatcaatgtcttctcttaaggtatcatagctctcgtctcttgcaccgatcgcttccatgaacgtcttgttgtcaggcaccagcttcaaacacactttgaaagcagcagacgcgatccatccatgatgcggttttaaagtcgtcatgtagcattcttctacaagttcttccattttcgacgacatctctttcgacaacaatcgtagtaaacccgcagtaaaatccattgtcctagtgagccaaaaaaaagagctctaccacaactagcaaccatcttggatgttccctcctccttttctttcttcagaatctcagccaaat

SEQ ID NO: 784 - DNA, 534 bp, Arabidopsis thaliana
  misc_feature (1)...(534): n = A,T,C or G
agggtttttctttcacatttccactcatgccaaaacaaaaagaaaaatatatggtaatgttgtgaacaagaacttagatatataatatagaagaaagaagaagaaaatcaaaatctagtcaacttgaacaaagatggagatcgaagaagcttgtatgagccgttccgtttcatggccagaggatccgtaacaccaccaccgtatgatctatagggactacagacaaatccgcnnatcggggaattcgtgaaaccatcatcatcatcataatcatcatcatgatcatgatgaccaggattagacttcatatccgccaaagccttgaagaagaagtcaacctcacaaggaagaacaatgggtccatcgcgtctatatccatactcagtctcagcatcttctaacaagttcttgaacaaaggatggttcagaagttttgtcttcacaacaattctttgtttcgtgggaccaacgtaaaccgtgaaaaatccatgtgacggcgactctttcttcggctttccttttgattcgttgctc

SEQ ID NO: 785 - DNA, 534 bp, Arabidopsis thaliana
agtaaaaatctcacattattcccacatataaaagattaatatattgttaccatttaactacatctacaaaacgaaagtattcgattatatagttggatgggaatactttattggatcacaaattcaaacatccatctatcttttcatctctctgatgagtggtgactcttaaattgaagaagtgaataagattccctacagcttggccgagaggtaatgaggagtgtcccaatcagtcttgatgtgggttcggctgatctctctcagtgaacggcaaccacttagtgccattgtaagctcaaactcgtctcttagcatttgtagcatcttcctaactcccgcttctccatccgctgcaagcgagaacaagctcggcctcccgacctaacggaacaagtaattaatcacatgtcctttggatatttatatgatcagtgataatactcatatgcagcaacgggacacacatttgtttcattgtttggcttcatttcgacaaattaaaaacaacttaataaaacagaggatatattt

SEQ ID NO: 786 - DNA, 534 bp, Arabidopsis thaliana
taatacatagttttaaatttccccttttctaatcttatctctcccaaatacataaacccatcccaaagatttcgagtttacaatttaaaaacagttttgtttagtgcaatctttaccttatctttacttctatcatctattcttcttcttcctccatctctagaaaattataatacttcttgtttcttaaatcttatttgtattacaataaccaaaacccaagtttacaaaacatttcttcttcttgtttttcgaaaccctaaatgttttgagttgtcatggatgtaatagctactacaactactatagtatccgacttggattcacgacaacccgaaatcgaagctccgatccggatccagcccgcgaagcctatttctttctcaaacggcaaacgctgccaccaccatcatcttgcatctgaagcggttgcggttgcgacttataaagaatgtctaaagaatcacgcagcaggtatcggcggtcacgctttagacggatgcggcgagtttatgccgtcaccgtcgtttaact

SEQ ID NO: 787 - DNA, 534 bp, Arabidopsis thaliana
gttatacctcatgagctctctcactccaccaatcttgtgaagcttgacctcagcaacaatcaactgtctggtccaataccttcagaagtcggaagacttaggaaactgaacttacttgtactgcaaggcaaccacctcgattcttctatacctgattcactttctaatctcaaatctctcaacgttcttgatctgtccagtaatctcctcactggaagaatacctgaaaacctctccgagttgctcccaacctcgattaatttctccagcaaccggctctctggtcctatccccgtctcattgataagaggaggtcttgtagaaagcttttcggataaccctaatctctgtattccaccaactgctggttcatcagatttgaagtttccgatgtgtcaagagcctcacggcaagaagaagttgagctccatctgggcaatacttgtctcagttttcatcctagtcctaggggtcatcatgttttacttgagacaacggatgagtaaaaacagagcagtgatagagcaagacgag

SEQ ID NO: 788 - DNA, 534 bp, Arabidopsis thaliana
tttttttttttttttttttttatgcaaacacaatggatttcaaatggcaagagagtattcactacaatgatttttttttacaaaatgttataagaatctattagtgtcatctttgtatatcctagaatctaaagctaacacataacgcatatatacactgtttttaaaaaccctatataccccctagttaacatccaaattttcgattttccaaattcagaatttccaaacgcaatcaagattcactggaccagtggaaccataagaattgtgaccttgccaagaactcgctgttagttcactctctgatgaacctgaattgtgaagattcttcttaaattgggtttcttcattgtcaagcaacatcttcagtactgaagaattgttttgtagaaacagaggatcgaagtctagtagagaacctatgtttggtaaaaagttagtcgatccggaaccaaacatggtagttttaaaatcggccacaagactcttgtcatcggttgtttggtcggagaagtaggtaacgtgagacaa

SEQ ID NO: 789 - DNA, 534 bp, Arabidopsis thaliana
  misc_feature (1)...(534): n = A,T,C or G
cattctctttggtgttcctggtgctttcactcccacatgcagtatgagccatgtgcctggattcattgggaaagcagaggagctgaagtcaaagggtantgatgagatcatttgctttagtgtgaatgatccatttgtgatgaaggcatggggaaaaacatatccagagaacaagcatgtgaagtttgtagcagatgggtctggagaatacacgcatcttcttggacttgagcttgaccttaaggacaagggtcttggtattaggtcaaggagattcgctttgttgcttgataaccttaaggtgactgtagccaatgttgaatctggtggcgagttcacggtttccagcgcagaggatattctcaaggctctttaagaaactttatcgtttcgcttgttgtattgtgaatctaaactgctgtatgtgaagaagagatttctatagcttgatttcaatcaacaagcatgtgtttgacttgcttggcataataaagtatttgataaacgttcaaaaaaaaaaaaaaaaaaaaaaaa

SEQ ID NO: 790 - DNA, 534 bp, Arabidopsis thaliana
ttttttttttttgtttttttaaagaaagtaaatttattcaccagactattattatatatacacaagggtacgttataagcatttatggaatgtaattagatttgaaccacaaagagacttttgacatgaaagttgatacttccttgtcattgtttctcttcacacagtggtagttttctgatgggaagaagaatcagaaattggcattcttatctttgcagattccttcaacaaatcgaatgaagaaaaggaatgtggcgggagaacaacggtcatatcctcctctgccaactctagcaagctttcatgtggtacaaccttctctggctgtgagaaggaattttcatccatcacattggtagaggtaagtactgtcttctttgatcccgaaactctcatcacgttcgggtccaatccagttaccaacacttgcatattttctgagttagctccgaagtttacagcctgcaaataacagattttgaaacagttttttagggtcaatatcagagctccggttgaacggacgcgtgg

SEQ ID NO: 791 - DNA, 534 bp, Arabidopsis thaliana
ccacgcgtccggcaagcgaggctaagaaaaaagaattgattctgaaatcctctggttatgttaatgtacaaggatctaataatttagcctctcttttctccaaacgcggcgaaaaaggcgttaatcaggattgtgcactcgtttgggagggatttgggtgccaagaagacatgatcttctgcgggatattcgatggacacggtccatgggatcactatgtagccaaacaagtaagaaactcaatgcctttgtcgcttctttgcaactggcaaaagattcttgctcaggccactctagaacccgagctcgacctcgaaggctctaataaaaaaatctcaagattcgacatatggaagcaatcctatctaaaaacgtgtgcaacggttgatcaagagcttgaacatcaccgcaagatcgattcttactatagcggcacaacagctctaaccattgtgagacagggtgaagttatttatgtagcaaatgtaggcgattcaagagcggtactagccatggagtcggatgagggaagct

SEQ ID NO: 792 - DNA, 534 bp, Arabidopsis thaliana
  misc_feature (1)...(534): n = A,T,C or G
aacaaaattttatttaattcaaaaagttgttgtttacagttcacctaataaatttacagccttgggcatttcacctaaaccagaagttacgatgcagccaaaaaaagaggaacaaaaagaccaaaagggacttagaaaannaaacatgaattaaagaacaaaggatgatgagaagagattgatgaagccttttctcatacctcactagcttaaagggtcataacattcacttcttggtgagttaagttgacaaggcctaacagtttacttgaactctagggcttgggattcccatgtatgctaagcgtggagagactcttactctaggactaggccttggagaaggaattgggccgtatggtgacggaaaacgtgtagaaccaggcgaaatccgaggagacaaactgacttgttcgaacgcttgnnnctgnnnttccattggataatctctaacacacccaattcttggaccaactccactgttccatttgcaagacagcctctttgcaagctggaacaccggtctttctctct

SEQ ID NO: 793 - DNA, 534 bp, Arabidopsis thaliana
  misc_feature (1)...(534): n = A,T,C or G
cctctagagcggccgccctttttttttttttttttttttcaaagcaaagtccaacctatggctataataatgagtaacaatcctagtcggattttgtacattatagaagcctaataattannngcctaggattaatatcactctagtgatttcttctctttaagcaactctactactttcctcatggtcggcctgttgataggaaaagacgacgtacagagcaatgcaacgtcaagaactttctctatctcttcatactctctcgtcgaaagtttcatctttggatcaacaagcttgctaagatctcgatagtttccaagtgaatcttgattcatggctccgtcttctgctgatggagaagggtaacacaaagctgcttccattgcaaacttaacaatgtccttattctccccaaaagacgaatcgttcggtctttttcccgtaatcagttcgagtaaaaccaccccgaagctatagacatcgctcttctcattcacttttgacgtataaccatattccggagcaatgtagccg

SEQ ID NO: 794 - DNA, 534 bp, Arabidopsis thaliana
tgtaaaaacatatgaattgagaatgaaactctagaaaaagcgaaaactgtcttggattcaaaataaagtactttctttagctacaaaaatagggaatacaataaaatggagacgaagatgattagaagaagaagaagaagaagaaagagtaaattattcatccaattgtttcaaaagcctgaagagaccagctgcttctcgaacccgagaaaactcaatgcagaaagcttgaacttctatgaatagatccttcacgttgatgatcttgttacgaattaagctttgcaagaagacgcaaacaagccgtacaagcctattctgcatgtatttgtcttgcttagcgttctcacaagacgatatgcaattagtgatgtacatccgtatgaagtccttgggaagttcaactgcagttgtgagcctattcacaacttccattgagtgcaggctcatgtccatatttcctagagcttcataatagtcattaatctctgtggagttattcaacttggtgagaatttcaactgctatctgagg

SEQ ID NO: 795 - DNA, 534 bp, Arabidopsis thaliana
atctgggtcttcctcgtttgctccgcttaagcaccatgaaggtcaccgtcgtctcccgcagcggcagagaagtcctcaaagctccccttgacctccccgattcggcgactgttgctgatctgcaagaagcgtttcataagagagctaagaagttttacccgtcgaggcaaagactgactcttcccgtgactcctggatcgaaggacaaacctgttgtcctcaatagcaagaaatcactgaaggagtactgtgatggaaacaacaactccttaactgtagtcttcaaagacctgggggcacaagtttcctaccgcacactcttcttcttcgagtatcttggccctctccttatctaccctgtcttttactacttccctgtttacaagtttcttggttatggagaggactgtgtgatccatccggtccagacgtacgctatgtactactggtgctttcactacttcaaacggatcttagaaacgtttttcgtacatcggttcagccacgcaacctccccaatcgggaatgtgttca

SEQ ID NO: 796 - DNA, 533 bp, Arabidopsis thaliana
  misc_feature (1)...(533): n = A,T,C or G
ttttttttttttttttttgttaagcatattgtgtactaattaaggcttcatgggtagaagctaatccattgtttcagttgatacatatanaacattgggatgaacggataccaaagtgaataatattatacnnacaccactaacaaagcttagaatgtgttgggcaactcaagctctgcctccacttgcataattgggtgagagcttctgtattcttcctttgacattccagaataaacaggttcagtgcctggccctccagaggttatgaagttccagccaaatgccgaccctccaaccaccttgtcgnnatctccatcagagctgtgcttcnnngtttcagatgatctcagtacactagtagtagtagtagtagtagtagtcgcctttccgttggataaagagtcgctcttagctgttttctcacgtttgggagactatccaatcatctcttcgtacagttgaagcataagcttcatcttctcttgaatctcgataactgccttagagttcctcaagtctggagttcgtaa

SEQ ID NO: 797 - DNA, 533 bp, Arabidopsis thaliana
  misc_feature (1)...(533): n = A,T,C or G
gtaccaaaacccatcaaagatctttttttttctcaattattgtgataatgaattcgatgtttagtgccttcgacgccatgtgtgcagagattatgggaaagaaagtcaccgctgcttcttatgtctaccgctctgaacgcaattctgcttcttcttcttcttccgtcggcggtcaaaacgcgtctttgtctctcaagaaagatgaaaaagcttcaaagaacatggatttaccaacgaagacaccgaggtttgctcttgagctcgatggtcttcattgcttcgagactatagttcgttcttgatcaatatcaagattaccaatttttgctgagtttttttttctttttcttgttttgttctgtttcgattccttttatgtaaatacaattttggaagatttaatttcttgattagaatcatcatccttatgtgatttgattcatcgtttctgctttactaattcatgaatttgnacatatattaaagaaaaaagaagactttttgtttctgttcaaaaaaaaaaaaaaaaaaaa

SEQ ID NO: 798 - DNA, 533 bp, Arabidopsis thaliana
gctttgtagcatctcgccgaagcgtcgttgatttgagagagacccaatttggattgttagaaaatgggttacataggagctcatggtgtagctgctcttaagaaacacaaatacagtggtgttgatcactcttatcttgccaaatatgttctccaacctttttggaaccgttttgtcaaaatcttccctctatggatgccccccaacatgataacacttatggggttcatgtttcttctcacatctgctctcttaggctatatatactcacctaagttggattctccacctcctcgatgggtccactttgcacacggcttacttctgtttttgtatcagacatttgatgcggttgatgggaagcaagcacgaagaacaaattcatctagcccactaggagagctttttgaccatggttgcgatgcacttggctgtgcgttagaaacaatggcatatgggagtactgctatgtgtggaagagatactttctggttttgggttatatctgctgttccattttttggagcaacatg

SEQ ID NO: 799 - DNA, 533 bp, Arabidopsis thaliana
ctctcccatcggttttgaacagcttggcagaagaagtgaaacttgagagagtaatggagaacttggaagatctgaaaattctggctgagcagtggtcgcatcaaggaattgaatatcttcagaagataccaccgaatcagctgtatgccgccattggtgttttgttgtttacaaccatcttgctcttcctatccattcgcctggtcagacgtaccaaatccaacactgtactcctttctgggctgaccggaagtggaaagactgtgctcttttaccaactccgagatggatcgtcgcatcagggcactgtaacatcaatggaaccaaatgaaggcacttttgttcttcacagtgaaaatactaagaaaggaaaaatcaagcctgttcatcttgttgatgttcctgggcactctcggcttcgacccaagctagaagaattcttgccccaagcagctgccattgtgttcgtagtggatgccttggagttcctcccaaactgtcgtgcagcttcagagtacctatacgagattctg

SEQ ID NO: 800 - DNA, 533 bp, Arabidopsis thaliana
  misc_feature (1)...(533): n = A,T,C or G
ctttttttttttttttttgacaaagaagatggcttctttacttctccttgagagaattgatacaacaaatctcatcaaaagtttttcgatgataaaccacaagaaacatgtctacaaacaacaacaagagcatgagcagcagcaacaaaaggtagatcagagtgacatttacatatcgtaaggcacgcgtttgtacagatccgaaggcaaccgaggcgttgcaaccgcttgcacaggggtacgcatgtaagtaacgagtccagggttttcagacatgtcaatctcctccggtttagtcccttgaggaggtgtccaaacaaaatggtgaagcaaatgactcatcatcgaagttaccaaattgataccaagttgtgcaccgggacaaacccgtcttccagctccaaacggaagcagcctaaantcatgacccttcatgtcaacatcttcttccaagaatctctctggtctaaactcaaatggatttttccatacagccgggtctctagccacagcccacacattcacatgaacgt

SEQ ID NO: 801 - DNA, 533 bp, Arabidopsis thaliana
ccacgcgtccggtttaaggcatgaatcagaaatgcattgggctggtgaagactgggatgaattcatcacagaagatgaagaagatcatcattatagctctaaaaccacaagagatggcaaaccagtaattgtaacacgtgacagtaaatcctctgttccatctcatgagatcaagatcaggctcacgaagaagcaactccatgatttactgagtaaagtcaacgtccatgacttgaccttccagcaacaaaccttctcatgtccaatcctgaacaatcgcgggtacgaagaagccaatcaacaacggttatggagaccggttctacagagcataccagaagttaactgagtttttttttcagagatggccatgtttgtatatgcttagggtttcttcactttcttgatatgtgttagggtaagagttttgatgtaaattttggtttggacacatgacgcttctgtttttgtttgttagaatgtaaatataaaagcataaaagcagaatcaaaaagcttgttgttaaaaaaaaa

SEQ ID NO: 802 - DNA, 533 bp, Arabidopsis thaliana
ccacgcgtccggtgaaccaagctcaggttttgtcttctctttgatcattcctttctcagcaatataaattagagttatatcctttataaaggattttgctttttcaccaacaaaccctaaattcggtgtctcagcaagaatcacgtgattctcgttcctcttcctcacgaaacccatcatcttctatctcatttgagaaatgggtcaaaagttttgggagaatcaagaagatcgagcgatggttgaatccaccataggctctgaagcttgcgactttttcatctcaacagcttcagcttccaacactgccttgtccaagcttgtctcaccaccaagtgattccaatctccaacaagggttacgtcacgttgttgaaggatctgattgggattatgctcttttctggctagcgtccaacgttaatagctctgatggttgtgtcttgatctggggagatggtcattgccgtgtcaaaaagggtgcttcaggtgaggattactctcagcaagatgagatcaaaagacgtgtgcttc

SEQ ID NO: 803 - DNA, 533 bp, Arabidopsis thaliana
atcttaggtttgatgttaagaagaccacatatgatgcaacataatacacatctactagtaatatgtcttattgaacaagtagcattatacatcactctctaactcgatccgaccatcagttaatttagatgatttattcctacactttttaatttagatgatccaatgattcatgctttagtgtacaagatctattcaatattaagcgtagaaactataagtagaagaatctgcaatgatgttcctcaaccctccaattgttgacgctaacattatgaacactcctacgataatggagatccaattgacgaaccaggtgacgctgaatctccttggtttcttgatgataagccacattatacttgggaggaagaaagaagtaggtgcaaaaccaaatcctccaaagaagcctagaaggtctccaaagaaggggaaactcactccaatgaacaatgtaaatgcgacataaatagttcgagtgaaaaacctcagaacaactccatgcttaaaaccaaatttgttaaccgcggccg

SEQ ID NO: 804 - DNA, 533 bp, Arabidopsis thaliana
ctttttttttttttttttttccttataaaataatataatacagaccaaatctgaggattcaaggttaatgaaactgctaagcaaaaaacttattacatacagtaacaagactttaaaagcatagtcgctggagatgaatatttatgcacacaaagaggtgtgtaaatgggatttagccccgaagtgatgcacgtggtaccgctggtaatccccattcatcttcagcctgagctcgtccgggtggagctcctgtatgccccattggtgctgaaggcaagttgagctcatcattaagatccggttccttatcgggttggagataagaaggcactccgtctgcttcagtctcgttccccatgtcagcttcaagagcatcaagctcgcccaggaggtcatcttcgtcaatgtcatcaggaacattgtagctcctaccaagtgtctcttgaatttcagaactctcatccattaagtccatcatatcatcttgcaaattatctatatcttgaatcttgacggttttcatcattcctttc

SEQ ID NO: 805 - DNA, 533 bp, Arabidopsis thaliana
ccacgcgtccgcttgaacacttataaaaaatattttgctcttctttctatatatttatataaaaagtcaaaatatcaagaagaggaagaagaagaagaaactcattttctccgcagagaaaatacaatccatggcttctacttttaggctctctattagcttcctcactctcatcctcttctctctgtgggtagtggaggcacacacgtctagaaagttgatatcaatcaaggaaaaagaaggtcaagatattagtcatttgctcaaagatggtgaatttgatgacccttcgttgtacatgtatttcacactcaatgatctcaaactaggaaccaaattgctgatttacttctacaaaaacgatcttcaaaagcttcctccacttctcacaagacaacaagccgatctcattcctttcactaagtcaaagcttgacttccttctcgaccacttctctatcaccaaagactctcctcaagggaaagccataaaggagactttgggacattgtgatgctaaagctattgaaggag

SEQ ID NO: 806 - DNA, 533 bp, Arabidopsis thaliana
ccacgcgtccggtaatatcaatcgatcgccattctcgacatttctctctctcaagctagtctaaagtttcttcttatctccttcctccgaccaaaacttcgacttctctcttattttcaccctcagagagtaaccatggatgccttgacctcgagtttggttcgatctcccatcgtaccatcgagaacttccgacaacggttctggatctatgttccttaccgccagtggccctggattcacgcgttctggttcttcaagacttcaacttcgtttaaggcaaaacgcgtctgctagatcctcaagatcattacagagcttaacaacgactgctaaaactcggagaagttttgtggttagagcttcttcagcgtctaatgatgcttcatctggttcttcccccaaaccgatcgctccgctccagctgcaatcgcctgctggtcagtttctgtctcagattttggtgagccatcctcatcttgtgcctgcagctgttgaacagcagcttgagcagcttcaaactgatcgggactc

SEQ ID NO: 807 - DNA, 532 bp, Arabidopsis thaliana
gagtaatcatagaatgaacatgaagaaagatgtgtaactgtatcgagtcatttgatggctgtgggagtattaaatcatgagggatccaaacctgagacaattgcctctagatggtgtcacaaggtccaactttgatacaataaaataaaacaatcgaagggagaaaacttttgtctccgacttgagttccatgtctttaattaattgatctcacgaaatgaatcagcctctgggcttgtgcagacgaggtcggttacagaagatcctgccattggccctcaccagtgcagccatgcccacgcaaattcccgtccacaacaatgagaagaacaagtgcttatgcttataatcactcccagtttgttttagagacattgttgcaaaccagaaactcatcagaaccacgaacaatgccactgggaagttggctacagcctcaaggcctcccttttgaggtacaggagccatgtctcggctcacagcaactatgtagtgcccttgcaagagatcaattgcatcctgcttagttcca

SEQ ID NO: 808 - DNA, 532 bp, Arabidopsis thaliana
tcttctgcaatctgggcttctccttcactctcttctccttcctcaaaaccttcctcctcccccatttgcttcaggccaggaaaattgtttggaagcaagttaaatgcaggaatccaaataaggccaaagaagaacaggtctcgttaccatgtttcggttatgaatgtagccactgaaatcaactctactgaacaagttgtagggaagtttgattcaaagaagagtgcgagaccggtttatccatttgcagctatagtagggcaagatgagatgaagttatgtcttttattgaatgtgattgatccaaagattggtggtgtgatgattatgggagatagaggaactggaaagtctacaactgttagatcattagttgatctgttacctgagattaacgtagttgcaggtgacccgtataactcggatcctatagatcctgagtttatgggtgttgaagtaagagagagagttgagaaaggagagcaagttcctgttattgctactaagattaacatggttgatcttcctttgg

SEQ ID NO: 809 - DNA, 532 bp, Arabidopsis thaliana
ttctgcagacaacaaaacctagaaaaattaaaattccttatagatttttatataatttaagatgcgattccaacacctaaaacaactaaaaaaaaacactcctaacgccaaacaccaaggctattatgtctaggttgttttctagatcattattattcttcagaacagagcttcttgcattgcctctgcttctgtctgggtctgtgtttctccttctctttcttgtccttcttcttgtcctccttgtgtctcagcagcttcagtttgttgagcttcagtctcctctggctgcacttcttccataacttgtggctcaacggtctccgtcactgttagtgcttccagatcttttatggcttgcaccactgcttgattctcacttgtaactccatccttcaacaccttcacaatttctttcactttctcttgaaaaatatcaaacttcttcttgagttctccagaatcttgtgtcccagtcgtgactgatgttccaatctttctgggtctacctacaggacgtcctcgtcctctc

SEQ ID NO: 810 - DNA, 532 bp, Arabidopsis thaliana
ccacgcgtccgagggtttaaagggagtttagttgactgggtgagtcagtatttgggtactggtagaagcaaagacgctattgatagaagcatatgtgataaaggacacgatgaggagatattgcagttcctgaaaatcgcatgtagctgtgttgtgtccaggcctaaggaaaggccaacgatgattcaggtgtatgaatctttgaagaacatggcagataaacacggtgtttcggagcattacgatgaatttcctctggtcttcaacaaacaagaagcttgagtatctttaccagaaagtagtcttttttggcagcttaagcgctaagaaggtatgagaaatctacttttgtatcagaagctttttttttttactttatatctcattctttgttccttccctcagtgttgttagtttttaaccgtgtcagtgctcgtgtttgtcttgtatctcctaccgtataattctgtacattcgtttgggtcattaatgtactctttggaatgtaacctcttctgatgaaatgagaaga

SEQ ID NO: 811 - DNA, 532 bp, Arabidopsis thaliana
cggccgcaacgaatcaggtttagattacaacaattcttgttcaagtaaagatacagaagagtgatgaactttactgtctcagaaagtgacaaaaaaatttgtatgggggagtcttttgacatcagttgatctttggcttaggagctcttggccttaagacagcgtaaagtaaaatcagtactatgataaaggcaggtattgttgtcatgtccacttccactttcaccttcctctcttttgtgcagtgaattgggtgcaaaacacccactgttgcattcacttctcttacaaatgagctagtagcttcctctaaggtatgcagaaatctcatggcatccccatagcgtgtttctccagcaacattcgaaagtcgtctccacaggctaaccacgtacttgtacttgttcatcagctcacgttcccttgattggaagagcttaaacgtctttttattcgttctctccagccgcaaaagatgaatcccagaattgacagcttgtattgattcttcaagcgctgtaatcatatagct

SEQ ID NO: 812 - DNA, 532 bp, Arabidopsis thaliana
ttttttttttttttttttttttttttctgaaattgtaactattcttgataagttttggtatcgtacaaatgagaatagaaggtttcatgagacggaaaaaaaaatcaatacagaagcacaaatgtgaatatacctacacgaaaaacaaaatcgtaatcgttcaaaagctttatctctgtactagaataatggtgttttcttggtagatgtaagtgtgaagatctttactatcgtagcttccctgcggaatgtaaatatactgaaacagagacgaccgttgaacccaagaagaaggctaaggaaagatgaaaattgaagaggaatacagagacaactgcggtgagaagcatcgccactgatgtcgaataaaccttcacgatattgtctgcatatttcatcaccatcgacacagcaatgccactgagagcatggttaagaatcatgagtaatgtgatgaaggagtaaccatggaagaatcccttatttgcaacggcatcaaaatcttggatcactatagcaacagcattgaaag

SEQ ID NO: 813 - DNA, 532 bp, Arabidopsis thaliana
acacgtggaggaagaatcagccgttggatatgcgttgactttcaaaggaaatagcgtggaacagttgacgcaggcgttgcaagaagagactagtatggatgatgttgtggtctgtacacgccatccttcaaacggcaagctgtttcctcttcgtttgcaacttccacctaatagtggaacaatgcatgtcattctagtaccctcaagtacttaacggcaagctgtgtggttcccctttatttcgaatgtattatataagtagactagtagttgaagtattaggctcaagattgagagtttggtccttgcctagttgcctccattagatacgagtgtggaattaatcatagaaagttcagatagactattattgtggatttgatttaatctttcattttattgtacataagcttattttgtaaacgaagcatttaagtttcgtcctcccattttttatgtgaattcgccataaaaaattgtttgtactataaaagttttttttttttttttttaaatattaaagtgtaaccca

SEQ ID NO: 814 - DNA, 532 bp, Arabidopsis thaliana
atgagctgccacagaatctcaaactacaaccatgaaaaatgcaataataatttccgattacatatgcaatggagttccaatatcacaaagatttgataagtttgaaaccaaagttcaatcttggtttaaagcttctttctgaagaacaatacaccaattcgacttgtcgaaaaatctatcaactatcattgcattgcctactccagatgccaacctttcaagttcgccttcgctaaagacatggtagtatctgttgtacacaacagctccttttctatcatctttctttgcaagcccacttgcaagtgcagacgcagatgcaccactcacttcagcacggtggtatggtaaatgccatggcacaaagtactcttgttgactcttcttcagagcctccaatgactcctcaacagatttctcatccttttgctctactatactagctttggtttctggaataatactctcacctttctgctctctcgtactctcctcgctctctggaatgctctcaagaccgatgaactgactg

SEQ ID NO: 815 - DNA, 532 bp, Arabidopsis thaliana
atctgatctaaatggagtatgaccgtacgttgaacttgattccatacggactacaaggagtaagagaggaggaagaaatcgaagaagacgatgaagagagcatgacgttgtcgtcagtaccagaaaacgaaacgtcggagtgttcttcgcctccggcgacgtatcctccaatccctcctcggcctaaaacaccgagagagccgatggagtttctatgcagatcatggagtctttctacttctgagatctctttagctttatcatctcagaaatctgataaacaactcaacaaaaaccctaatatttctcagttggccgatgtcacttctctggctccggtagcaccaccaccgccgctacaaacgggaaagctagcgagtgcggttcacgcgcggagaacgggaacgatcggaaaatggttccaccaccgagaattcgtcggcgggaaggtctccgccgtgaagaagagagatagagttcgcgtggagaaagctcatctgcattccgccgtgtccattgcgtctctggcgac

SEQ ID NO: 816 - DNA, 532 bp, Arabidopsis thaliana
agaagaagctgcattgacattcgtgacagtaataagacaaacaaatgtatgttgttctgaaccagtaatttggtaccccaaaaaaaagatgcaaaatctcataaattatacaagaatttcaatttctcttacaaaaagaataatcaacctggcttgctcagtttcgaagacaataataaagggtctagcgattgggaacaaacaccatttattgggacggacgactcagaggtgtgatccaaccgcagaagtaaaaaataaagatgcatttggacatatcatcacaccaaggcagtagaaactatgttcttcagttggtggtatcgcgactgtaaaactgatcaagggttttcgcgggtatacggtgaagtaactcacgggggaagattctgaggagagtccatgccaggtcgagtgactggaagatgtttcgggtatcataagctccctgagccacaaacttcctctcgaacttatccaagaactcaagatatagcagatcctcggaagaaagagcttcttctccaaccac

SEQ ID NO: 817 - DNA, 532 bp, Arabidopsis thaliana
tctagagcggccgccctttttttttttttttcgcttgcagcatcattataacttaaaaatgaaataaaaagtcgttgcacttctacattttgcctaagcttcatcgtagatcctatttagacatgaatttccaaaaacaaatctttgaggatataaaatctgcagagaaaggctacagatacaagggaaatcttaaaagaaaaagggaagaggacaacaaaagcctcccctctttatacaggaaatttggataaaaaccaaaaacacagtaaaaaccgcattgttgtgttggttttacactggtcaatgaaaggcttgtgtcgagacaccaagctgatggagaacactggttggggaagatgaggaagaagatctcagggcttcggccaatggtccgcccatgttgtgatgatggtggttggaacctccaccgctccaccagctcatgttttgctgatctctcccattgttgttgctccgggctccctcttcgttgcctgtggacagcttcagagagacgtctgaggaagag

SEQ ID NO: 818 - DNA, 532 bp, Arabidopsis thaliana
  misc_feature (1)...(532): n = A,T,C or G
ggtcccacaacacccaacactgagaaagaaacaccattcttctccgtgttctgtctctatctgctaattaccacaaagaagaacttgcaaatcccttctcttttgttcaagtcgtacgacagagcctttgaaagaaagaactggtggggaagcgttaagctacagataactccaagatacgggtctttgtttgttttgaagatcagattcattttacgataattccgttactcgttattgtgtatatatatctctttcccggaaatttcggttcttgttgtacaaaaactccaaaaaaacgcataaaaaatattctgtaaatggttgaaattctctgggaatttcaacgggtcttgtggtatcatgtcacagaagagagagtttgaagaagggaaaggtcgaattgagggcggctcatccgaagacaagcgtagaagattcaaaagtgtggttcannaggtaatgagattacaaaccgtcaaacattttctcgaacctgttctcgagcccttaattcgtaaagtggtcaaag

SEQ ID NO: 819 - DNA, 532 bp, Arabidopsis thaliana
cctcaacatcagcagcagcaactacttgcacaacaacaacaacagctcaggcaatcttctatgcagggattgggtcaaagtcagataccagcacttcatgatatgcatgggcaagctcagcaaaagtttcagacgtcacatgggcaacatcaaatgccatattcccagccaatgggcgcgcaccaacaattccaagctagacagctctcaggtggacatattcagcatagcatgtctcaaggacagctcaatccagcgatgaaccgtcacttaaaccagttttcaggtggagccaatagtgcattgtttacttctgcacaaggctccccaagtagccaaatgataccaaacatgtcatctatgcaatctcagacacttgttcctaggatgcagcaatttggagtttcgggtaccaatccccaaagaagccattcgtctcaaatgttgggtgaccagatgtttaacaccagcggaatgatgcaaacacagcaaacacaaattcagcaatcgcaacagcagcagcagcagcaac

SEQ ID NO: 820 - DNA, 531 bp, Arabidopsis thaliana
acccactgcgctccagtgagtgttcctatcatgaaaatgcgaagaggaaggccacgggttaacataccccacaaccctagcctctttactgcatcagcaacggttgctcctttagagttattgaggaaagacaccaaattatctgcaggatgtgagatgatggcgcagaatattccagcaatgtatccacctgcaaagctaaccccgagctgaactggctttgagcactcttcttttggggtaggcatcactttcttgtatatgagctccacagtgttttcaaaagtagcaaatttcatcatcgtatatggaatctggcgtccccagagaggaacaagtcctttgtgtaacccgcggaagccttcggatttgatgatctttggtaaaccatcagataaaccgcgggcgaaaccaggctgagtctggaccctgactttgacagcttccattggacaaagagccacatcagcgacgatttctgcagaggctgagccagcgaggtaaatcaaggtcttgtatttagctgcgtat

SEQ ID NO: 821 - DNA, 531 bp, Arabidopsis thaliana
ggccgcccgggcaggtaccacccgatgcaaatatattagccaacattactaatgcccttatcgctgtcccaccgttatacacccaggtgctgcatctgatgaacaaaatgaatcttccacctccttttcgcctggccctgcccacaccacctctacctaaagcaggcccccaacaaactgacttggagcatcaatctagtagcgagtcagagatggaatctgatgaggatataggtacgtcaaaatcaggaaggaagcgtgctagacatggatttcttgttggtcttggtatggacaaggatgtgccacatgagactgttggagtgaaaccttcgtctttgaccccaaaagagatccctcgaataagaaagaataaacacgttatgcagatcaagatcacctctaaagttactcaagacgaatataaagaggaaagtgagaatgaagaccctgcagacgagcccaaagaaaaagattcaaatttgaaaccctttgcaagtttagaggaattggagaaaggaaggttacctc

SEQ ID NO: 822 - DNA, 531 bp, Arabidopsis thaliana
gagagattggatctaagcttgtggttttgtttcagagcaatgataaagagctctcttatgatgaccttttggactcaacaaatagttttgatcaagctaacatcattggctgtggcgggtttggtatggtttacaaagcaacgttaccagacggtaagaaagttgcgatcaagaagttatccggtgattgcggtcaaatcgaaagagaattcgaagcagaagttgaaacactctcaagagcacagcatccaaatcttgttcttctccgaggattctgtttctacaaaaacgaccggcttttaatctactcgtatatggaaaacggaagcttagactattggctacacgagcgtaacgacggtccagcgttgttgaagtggaaaacacgtcttagaatcgctcaaggtgctgcaaaagggttactttacttgcatgaagggtgtgatcctcatatcttacaccgcgatattaaatcgagtaatattcttctcgacgagaatttcaactctcatttagcggatttcggactcg

SEQ ID NO: 823 - DNA, 531 bp, Arabidopsis thaliana
ttctataccgaatcggatcattgggaatggaaagagcaggagttcttgcattttcactcaacagggacgcaagggtattaatcaggacgcaatgattgtgtgggaagattttatgtcgaaagatgttaccttttgcggtgtgtttgatggacatggtcctcatggtcatcttgttgctcgtaaagtgagagattcattgcctgtaaagttgctgtccctcctgaattccattaagtcgaagcaaaatggacccataggaactcgtgcaagcaaatccgatagcctagaagctgagaaagaagaatctactgaggaggataaattgaatttcttatgggaggaagctttcttgaaatcattcaatgctatggataaggaactgcgatcccatcctaatctagaatgcttctgcagtggctgcacagctgttacaatcattaagcagggatcaaatctatacatgggtaacattggggattctcgggcgatacttggatctaaagacagcaatgattcgatgattgcagttca

SEQ ID NO: 824 - DNA, 531 bp, Arabidopsis thaliana
ctttttttttttttttaaaagttaataaggtttcattatttaaagttaaagcaaaagtataaatagtttagaagttgtcgtatatagaaagcaccaaaactgaaaagcaaaaagtaaaaagctgagccaaaaatgttaaaaagaatgttttaacggaagtttctgtagacaggactgtacatgcagctctctgccatctttacgaggtccttaggacgaggcagattcgatgccagtccgagttcgtaggttttggctcccacactggctgcaatgttagcagagatctttctgatgtttgcaaaaggcggatagatcagtccgttcgcaaaattctcttccgtcacttgggaggccagcgcttccgaagctgctagaagcatgtcatcacggacacgaatggcaccggacatgatcaaaccaagaccgagaccagggaaaatgtaacagttgtttgcctggccaggcgtgaattttttgccatcatactgaacagggtcaaacgggcttccacttgcaaagattgcacga

SEQ ID NO: 825 - DNA, 531 bp, Arabidopsis thaliana
tttttttttttttttaaggaaattatttgttcgatattgatagagctcaagctctgagaggaaaatgcatcagccaaaccaaatttttacaaattaagaacaaattggtgacaaaaaaaatgaaaattctaacacctttcctctgttttgttttgctatcttgttctttaaactcaaatctttctgacaaacctctgtgttatttactttttttactagggtatgggtttattagatcagaggtaatgactttgttgaaacggcgcagacacggccatccacgggcggtccaacatattcggttgcattgatgatgtcgttgtgaagccacttgactgtggaggtccaactgtgtgttgctgcattggactgaaagacaatgataaaggtgatgattcaaccggcgcgtggaggccgttttcatcaggagagagcagagaccagaaaactgatggttctcgatcattattgaccccggggcaaaagagaaaattctcgctcatgtcctgagatacattgcggacatttcca

SEQ ID NO: 826 - DNA, 531 bp, Arabidopsis thaliana
  misc_feature (1)...(531): n = A,T,C or G
aaaaaaaaggttttattataagacgactaaaacattatttgtgtttcacaaatctctcatttatctatctctctcaaaggtttttcaacctctctcccctgatataagcaacaaacaaagtctcaaacaaaacaacacaagaaaataaaacacaagaaccacaactaattgaacatgtgctttaaccacaatcaagaatctcattagttcaattaagtgaactaagaaactcaacccaaatatgttctgctctctttgtcgtctccaccgcaaattcctcagccgcttgctcgtcctttgccttatgcaccgcctcgtgatactcttcgtaagcctgtgacgcctccttgagaagctctgacagactcgtcgttaaagaggtgaactttgaatcaacgtccactttctctgcttctagctttgccaacagtttcttgatcgctacgattctnatgtgcaacgcgtctcctctttgagcagtggtctttgctgctgcgaaaaccgagtctacggttctctgcttctccattg

SEQ ID NO: 827 - DNA, 531 bp, Arabidopsis thaliana
attacacacaccaacacatatatatatatctcttttctcttacataaagacggacccgttcattatttattgcagtttcaaagacttgcttaagtttcaaagacccacacacagacgaggagtatttttctattcctcggccaagagatgttcgtcgatctctttggagatctcgacacagaattggagaagggtttcgggatgagctacctcctcgctaattttctcatactccaggtgccagtgcgcaatactccctgactccccttgcttaggggtcacttggagtgtaaatgcgaagctcttgtactcattcatcagatcaccttctaaaaccttgaacgtgatcaggttcttttccggatccaccgcctcgatcttattcttccccactgttaactttccatcatgaacgtatttccagatgacgatagagccgactttgccccagtcgccttcgtgcagctcacatccatgaattttatctggagttgctttggagacatggtgtggtctctcggtaaacatgtg

SEQ ID NO: 828 - DNA, 531 bp, Arabidopsis thaliana
  misc_feature (1)...(531): n = A,T,C or G
ccacgcgtccgtcttcagcttctgagtcttctcctctctctctatctctcaagtgggctttgctttgctgtttttgtcttccttcgacgactcacttttgcagattctcataaattcttcaaagctttgagtcttttttcagattcgagggtcggttttatatatgcttcaaatctcttacccaaatcaggtatggagactctgcatccattctctcacctacctatctctgaccaccggttcgttgttcaagagatggtgagcttacacagctcgagtagcggtagctggactaaagaagagaacaagatgttcgaacgagctcttgcgatatacgctgaagactcgcctgatcgctggtttaaagttgcttccatgatccctggaaagactgtttttgatgttatgaagcaatatagtaagcttgaagaagacgttttcgatattgaagcannacgtgttcccattcctggttatcctgcagcttcttctcccttggggtttgacacggacatgtgtcgtaaacggcct

SEQ ID NO: 829 - DNA, 531 bp, Arabidopsis thaliana
ttttttttttttttttttttttttgagaaaaaagaagaagcattgaaaaagcaggaatgaataatacaatttgccaatgccaactgtctcacaacaagaacaagatgtctctgatttaccacaacaaacacaggatggattcagatcttattgattgtacaaatttgcgaaaggaagacttgaatgggctgtgttgagaccctcataactcatctcgtgaaccacttttgctttcatatgatgcataagctttgatgattgaaacatacacctcaatgcctttcaagtactcagctttacccaaatactcattgtggtcatgaagcagactcggggtgtttgatatgggagagaacccaaaggcaggcacgccagccttgcgaaagtagcgagcatccgttgatgcagggaaaatctcaggcttactggtcctacctccggcttccttaacagcattttccaagagcccccaccaaggatttgaatcatctgctgctgtaaggaattgcttccccgtaagcttctgcttga

SEQ ID NO: 830 - DNA, 531 bp, Arabidopsis thaliana
tttttttttttttcctcaaagaatgaaatgttgatgttccgtgttactgtcataagctatgatatttaaaacttacaagaggtgtacatgctagctttttttggcttgggaccgtatctacgcggttgaagaaggaaaaaaaacaaaaaaaaaaaagtcttggatcagtacttgacgacatggtggcgtaaccatagttcatacatgatcatgtgaaatgcgtcgaatttgactggaggtgagttccattgaaaatgcttctgcacctgcacaacaacaaacccaatcagcttcttgtatacaatactggataagatggtgaaattctctttaccttgaccaagttgttatgcaacgaaacaaactctgagtgaggtatgttcttgaggatctgcttaaggttatagacatcttgctctctgagtacaaccgcaaattttcgccaattcaggatgtcgttgaaagggaggtcgtagtagtctgataatatgacaggaatacatccgtaatggatcgagtccgttatgcgag

SEQ ID NO: 831 - DNA, 531 bp, Arabidopsis thaliana
  misc_feature (1)...(531): n = A,T,C or G
cagtaccctggatatcgtcattgaagacaagatggctatcactgtacttagacaaaaggtcaaacgcattgtggtttgcaaaatcttcaaactgaaccaacactttctctccatagttctgctttacagcgcacatgaattcgtgcaggaattcagcatattcctggccagttgctcttcgctgtttaagaccgatgtagaattcatcatttagcaacttctcattgtttgtacccacatcaatggtgattggaagacaagctgatggacggattcctcccaaagcggtgtaaagagaaagtttccccactggaattcccattccctggcaaccaagatctcccagaccgagaatccgctcaccatcagtaacaacaataacttggattcctctctggggccagttcttcaaaacttcaagaatcttgcccttctcgttcaaactgatgtagagnccctgtggcttcctgaaaatgctcccatacttctggcaagcatcaccaactgttggtgtgtacctcggccgcgacc

SEQ ID NO: 832 - DNA, 531 bp, Arabidopsis thaliana
ctttttttttttttttcatcggttcattaatttttattattccatattcatgctgaactttataccattttatctcagtttgtgcggctactctcgctactaattacaattgggcttctgaccttgtacttggcattagaccaagtaagagccccaaatacatcttgcttaagtgaagcagtagcagacactatcacctggtatgtcaacttctcaccatcttttgtaaattggagtttttctggcgtcacttgaatgttaaaccctggtggtgtttccacgctgactgtgtaaaccgcctcaccgtcctcaccaacattggtcactgttcttgtaactgtcttgctaccatttcctttgaatccagagattccaattgacgggtaattgatggtggagatcaagtctaagttggaatctgcagggcaagtaaaattctctggaaaagcttttgacatagcctttattgtggttacgttatatccatagtaacagagaaagttcaggtagtcagtttcagtagtctcgtaa

SEQ ID NO: 833 - DNA, 531 bp, Arabidopsis thaliana
ttttttttatgaagaattgtttactaagctgaaactctgacatacaattgagttatagatacaattggcacatcacaaactggaaactgcttctctcaagcataagagataagaccaatatataagccaaaattttgaattactaattgaaaaatatgacttttctctgctaaattgctacaacattaggctgcttctgtgacttcgacgagccttccacgaacccacttcttcgttacgtttcctgattccaaagatgcagccttttcgtcaatcccgtggtaaccatttggaagaggatgattctcagcaagactgatagctccattagactctgctggtggatggactctcgttccgtttggttgcccaactatcccgagtttgatatcttctctacctccttgggatgtgttggattccatatcagaaacaaactggtttgtagtaccttctataacgaaagtcggtaaatcgttagatctcatgttcatgtgaagactctctccgttgatctgcaatgtgtgtgtt

SEQ ID NO: 834 - DNA, 531 bp, Arabidopsis thaliana
attcgcggccgcttgcaacacatatttagccaactgcctttgaactttgataattatataaaacccccttaacaagtaagaaaaacaaaaactgagacatgtgcaagtaagctaagactttttcttctactcatggggtttttccttttgttgcttcttctatatgacgcctgaaactttcaaagaagaaagaacaacgaagacgacccaaagcatcatgaaataggcagaagtaagccaagcccatagccttggacctccaagctcagctcctataatcaaccttctcaacacaagcaccacgatacatcccactgatgtcgcaaagaatatcagaagcgaaaagcttaatcctttagcgttttctatgtataaaggctctctgtatgcaaagtagttgtagactgtgtttatcagccacggaactccaatccccacatagatgttcaccgagttactgcaggtgatgtttgcaatagctgaatctgcggttagttgtcgctctgcagcgattttacttgctactaagtc

SEQ ID NO: 835 - DNA, 531 bp, Arabidopsis thaliana
tctgttgatcaaacggctcgcatttggaatatcgaaccacacggtcatagcaaggctaaggaccttgagctaaagggtcatactgatagtgtggatcagctatgttgggatcccaaacattcagatcttgttgctactgcctctggtgataaaagcgttcgtctttgggatgctcgcagtggaaaatgcacacagcaggcagaacttagtggagagaatataaacatcacctacaaacctgacgggacacatgtagctgttggtaatagggatgatgagcttacaattctggatgtccgtaagtttaaacctctacacaggcgcaaattcaattatgaggttaatgagattgcttggaacatgcctggagattttttcttcttgactactggacttggcactgttgaagttctttcatatccatctcttaaaccacttgacactctcacagcccacacagccgggtgttattgtattgcaattgatcctaaagggagatattttgctgtcgggagtgcggattccttagta

SEQ ID NO: 836 - DNA, 531 bp, Arabidopsis thaliana
gaaagtctagatttttgtggattttgattttgtgattccgtgattgtatgaacttgagccgttttgcttcgagattaagaatggcggaagaaatctcaaagacgaaggtgggatcttcttctactgcttcggtggctgattcatctgctgctgcgtcggctgcaacgaatgcggccaaatcaagatggaaaattttgtggcctaattcgctccggtggattcctacgtccaccgattacatcatcgccgccgagaaacgtcttctctccatcctcaagacgccttatgtacaagagcaagtcagtattggttcaggaccaccaggttctaaaatcaggtggtttaggtctacgagcaatgagtcacgttacatcaacactgttacatttgatgccaaggagggagctcctacactcgtcatggttcatggttatggtgcttctcaagggtttttcttccgtaattttgatgctcttgccagtcgatttagagtgatcgctattgatcaacttgggtggggtgggtcaagta

SEQ ID NO: 837 - DNA, 530 bp, Arabidopsis thaliana
aagtcaacaggcagttaccataaattaccaaacagattaacaaaggaacttcggagttatggtcaaacaaagaaagtaaatgaaaaacatatcagtgtatgtgaggcaggcgtgtgatggatcatactactgcagttctttctccagttcatcgaattcccatccatcaacctcatctgcagagtaatcacgagccaccttaccaaattcagattccagctcggctagttcggcttcagggttaaactcttgactggaaccagctgcaggattgggtgcctgaggagaattgctcagctctggcttttgggtctgagtagattcagttgaagcattcatgctactactgctaggcttgggagatttgggtgatgtagcactgcttttaggggacgtaacactgcttctaggtgatggaatctctatctctaacgttggcctcgctatggattcaaattgctgcctcattttctccatgtcatcaaacagctctttcacacgccggtcgtcctttttatccagtttgcttt

SEQ ID NO: 838 - DNA, 530 bp, Arabidopsis thaliana
  misc_feature (1)...(530): n = A,T,C or G
taaaagtttattgcttggctccataaaaagtgcaccttttttctctcttttctttctctctctctcacttctcnnnngatgcactattgtccgtgagatcagagattcaccctctttagattttgcgcagaaacttttgcccacaattttgttttctacaaatctgagctgagatctctagagtgagaaaatgagcatcactaatgaagaagcagtgaagcaattgcgtgctttaatggaagatgttgatgattcactcagagagtcgtatcggaacattcatcaagggtatccgacagagaatttgttacgctttcttaaagccagggatgggaatgtccagaaagctcataaaatgttgctcgagtgtttggaatggaggactcaaaacgagattgacaagatactaactaaacccattgttcctgttgacctgtacagaggaatcagagacacacaacttgtcggtgtgtctggttactctaaagagggtctccctgtcattgccattggtgtggggcttagcacat

SEQ ID NO: 839 - DNA, 530 bp, Arabidopsis thaliana
tttttttttttttttttttttttttttttttttttttcttaggaatatatgtatatataacttatcaatttatcggatagaaacaaacattgaatttctcaatgtcactctctgcatatttttgtttatagtttttgcagctaaaccaagtttccagtcgaagcagagactttagcatcaagggatctcaatatctcctcacccattctcttgcaacctaccaacgtagttccaggagtgtgaatgtcacgagttctgaatcctcggtccaagacatccgatactgcttcttctattctctttgctgcattttcttctttcaatccgtatctcaaaagcattgcagctgatagaacagctgcaatgggattcactgtgtcctgcaattcgcaatgtcgacataattatactgcaaccgatattaaacgagtggtttcacatacagtatcatgcatatcaagatccagaggcaaccttcccgtagtgtttaggtgcagatccatgcacaggttcgaaaatcggacgcgtgg

SEQ ID NO: 840 - DNA, 530 bp, Arabidopsis thaliana
  misc_feature (1)...(530): n = A,T,C or G
gcggccgcccgggcaggtgcaattaacatgaacacgatcaatcacttgtccaaaacctgtaaaaccccaaatatccaatcaccgatttgcttcgatcgcananncttttcatattctctcattcctctgtttccaaaaaccctaaatggcttctcctcttactcttcttccgttagtcgcagatcgagattcatcattcccaagagacgacgattctctgtttccatggagtggcaagactgctcagtaaagatggaggtcgatgttccagtatcagtagcgtataatttctacttggatcgtgaatcttttcctaaatggatgccttttatttcatctgtccaggtgttaaaggacaagcctgatctatcacgttggtcactcaaatacaatgcttttggtcaagacattaagtattcttggcttgctcgtaatcttcagcctactcctaatcagaaaatccattggagatctcttgaaggtcttcctaataaaggcagcgttcgattctttcctaaaggtccttcatc

SEQ ID NO: 841 - DNA, 530 bp, Arabidopsis thaliana
taattattatcttaactaatcttgatcttttttattttttatttttttggttagctggaaaataaattgtcggcaattacagatcaaaatgaggcggagaaatatgtagatgtgattgacccaagggatattaagattgggagcagaaaattttatagatacattggatcacttactactcctccttgtacgcaaaatgttatttggaccgtcgttaaaaaggtaaatactcatcgttattttcttctcttttttacttaatcaaacatagcattaatagatcattacaaggtactaatagtgtgaatatccatatccaaaaggtttatccatctacatgttaactaggtctatttttccaattttaaattttgactttttattttaaaatcattcgtttaaatttatttggttggttttttaggtaaggactgtgacgaaaaaccaagtgaagctactcagagtggcggttcacgatgtaagttttacttaaataatttacttagtgaatttcacaactatactatatc

SEQ ID NO: 842 - DNA, 530 bp, Arabidopsis thaliana
  misc_feature (1)...(530): n = A,T,C or G
gattcttcgaacttgatatttgggaaacttgcaatccgattctgtcaccagtgttttgccttcataaatggagtttgttgttgaagaaggaaagctagtgaatgaagattgctcgactttagttctcccagcattgtcaattgggaatgtaggacagctcgctgttgatcttctagtgtcatctactggtgcagagagagttggttatcttgatgatccaaatctgcttccttgtgttggaaatgatgcttatggccctcttccttgtggcgagatcgcccttcctctcgaggtttatgagtcatcttcaattgctactacccttgctcagcaacggtctccagttgcaaagggaatgatgattaaatttgcggagaatatagccaattttgctgcttcaagtggaaagaagcacgtcattgtgttatcgagtttagacttccaaaggctgcataacttggatatgtcgagnggcccacnggtgtattatctgtctaacgctgaatctgatggaagagatgatcactgtg

SEQ ID NO: 843 - DNA, 530 bp, Arabidopsis thaliana
tcgagcggccgcccgggcaggtattgagaatggatacttgagtgagaaatcgaatgatgaggaagagagtgggagtgaagaagatggttctgattccgatgagtttcatgagaagtcagaggaggagatagataggcttcttgcagctgcttgtgatgatggttgtgtgagactgtaccgtatctctaatttagaaaagttaacttactatagatcattgcctagggtcagtggacgtgctttaagtgtaacatggagtccagatgcaaaaaggatcttttcggggagcagtgatgggctgataagatgctgggacgctacctcgtgtcatgaggtatacagaattacagctggtcttggtggactaggaagtagttctgagatctgtgtttggtcacttctttcgttgaggtgttcagttcttgtgagtggagatagtacaggaactgtccagttttgggatagtgagcatggaacccttttggaagcacactctaatcacaaaggtgatgtcaatactcttgcagcag

SEQ ID NO: 844 - DNA, 530 bp, Arabidopsis thaliana
tcgagcggccgcccgggcaggttttttctcatagtcacagctggtttcatcatctctttcacttccactaacttccctcacgcgccgacaaggcttcttgattgcaccgactcttcttcttcacctctttgcgcttcgagaaactttcttttcaacaaacaacaaccacgacctattcctaaacatgatcctaaaccaaataccaaaaaccatgatcacgtgtccgatacaccaaaccatcctctagacccactcacggtgtcggagattaacaaaatccgatcaatactctcctctcacgcgctattcacttccggtacaccacacgcgctccgcaccgtcgttcttgaagagcctgagaagaatcttgtccgtcactgggaaaaagggaacccacttcctccgaggaaagcttccgtcatcgcacgtgttggcgccgacacgcacgtgctcaccgttgatatctctacgggtcgagtagattcagagaatagcccggttcgtgtttcgggttacccgatgatgactat

SEQ ID NO: 845 - DNA, 530 bp, Arabidopsis thaliana
cgcgtccggaggcatcaagttacaagaacatggctgcaaaacttgagttcgacctaaaaagcttatcggatgcatacaacagtctagaacaggcgaattaccatcttgagcaggaagtgaaatccttgaaaggaggagaaagtcccatgcagtttcctgatatagaagccattaaggaagaagtgagaaaagaagctcagaaagagagcgaagacgaattaaatgacttgttagtatgtttgggacaagaggagagcaaagtcgagaaactaagcgcgaagctgatagaattaggagttgatgttgataagcttttagaggatattggggacgaatcagaagctcaagcggaatctgaagaagactgaccattgaacaagtagtagagattctatatcctctaaaatgctctctcatcaggtaatggaacttgtacagtcttgggtggtttattttgatgtttgacaattctctttgcttaatcttttagttataactctttaatttatctaccaaacttcttagattgc

SEQ ID NO: 846 - DNA, 530 bp, Arabidopsis thaliana
ccacgcgtccgacgaactttaagttacgagaagctttcaggagaatcaagagctcacatttcgcgtaaccaaaagtttcaggctattgagacactagatgaacaacaacaacaacaacaacaacaacaacaacagaagcagctcatactcagaatggagaaggttgagacttcaggagaaaacgagaagctgaaggaacatatcgaagggattcaatggagggtaatggaattggagagagcttgtttgaaaatgcagaatcaaatggaagttatcaagaagagatccaagagctcgagcaaaggaagtaatagatcacttcctaagctctgttcttgattagtgaagctgtaagcttacgatcatatttgtacatagagtgatagagagcataaggagtcaattatagttaccatttggttcttatgtttcagagtatttatcttttcttgtgttgttttctttgtcacaaagttgtgcgtaatgaaaagtaaagataaattcgtttttaaaaaaaacaaaaaaaaaaa

SEQ ID NO: 847 - DNA, 530 bp, Arabidopsis thaliana
cggccgcgctaatcaccagaggttcttagccactgggatcaaagtagctctgacctcaactatatgtagtaaagaaattgagaagaatcaacctgagccttccaacaaccaacagaaggctaatcagattcctgctaaatccacaagccagcagcaacaacaaccttcttctgctactccacttccctgggctgttgacgatttctttcacttctctgatattgaatccaccgacaagaaaggacagcttgatcttggggcaggggagttggattggttttcagacatgggattcttcggtgatcagattaatgacaaggctcttcctgcagctgaagttcctgagctttctgtttcgcatttaggtcatgttcattcatacaaacctatgaagtcaaatgtttcacacaagaagccgaggtttgagaccagatatgatgatgatgatgaggaacacttcattgtccctgatcttggctaaaaagctatatgtaatctatgtgtagacattcttcaatgtaaaagaacaa

SEQ ID NO: 848 - DNA, 530 bp, Arabidopsis thaliana
ggacccgatatggttgttctcgttgttggtcaagactctagcgcttttgatccaaacgggagacaaagcctgacaatgaatggatacagaaggattgggcagataatgaggggagttgcagaggagcacagccatggaaggttgcttatggtgcaagaaggcgggtatcatgtaacatatgcagcttactgcctccacgccatgctcgaaggggtgctgaagattccagaaccgcatctatctgatccgatcgcttattatcccgaagaagaagctaatgctgttgctgctgtggagtcaatcaaaacatatcacaccgaatttgttccatttctcagaggaacttgaaaatgggacgtatgaatgagtttatgttattcctcgttgtcttgtgaccttttggaacacagatccaaatcaatcaggtcaaaccgtatatatcaaaatacttgttgatcaaactatcttttgtatgaaaacttattcacacgaaaaaaaaaaaaaaaaaaaaaaaaaaaaaaaaaaaaaag

SEQ ID NO: 849 - DNA, 530 bp, Arabidopsis thaliana
gcggccgcaaaaaggtgtgctgttttctccagcacaagttacatgataggaaaccaaaaaagaaaccaccttcatcacaaaggctcattacatgaatcaagcaagaacagcaacaacaacaacaacaacaacaacaaaagacaatggttcgtatgagtttgtttccttggttgggtcaaacagttgtatgtatatacacattgaaatcatcttttgctttttggttgaaatcatccatcacaatccatttgctagttttgccctcagatctttcctcaatatcttccctgatggagctttaggaatggattcagtgaagaacactttgttgattctcttgtaaaacacaacctgtttcgacacgaattgcttcacatcatcttctgataactccgaatccttcgatttcaccacaaatgcaacaggaacttcaccagctgcttcttctttcattgcgacaacagcaacatcagtaatgtcaggatgaccgatgagcaaagcctctagctcagccggagctacctgaaaac

SEQ ID NO: 850 - DNA, 530 bp, Arabidopsis thaliana
ctcggtgaccatattcaaaactttcccacgttaattctctcttctttgttttgtttcagattcattacttttctccaaaaaactttcttcaagatctgttcttttaaataattatggcggaagaacatcgatgcgagacgcctgaaggtcaccgtctctgcgttaacaactgcggtttcttcggaagctcagcgacaatgaatctatgttcaaactgttacggcgatctctgtctcaaacaacaacaacaagcttccatgaaatcaaccgtcgaatcatctctctctccggtgattgcacctgttctcgaaaactacgcggcggagttagagatcccgacgacgaagaagacagaggagaaaaaaccgattcaaattccgacggagcaaccgtctccgctgcaacggccgaatcgatgcaccgtatgtaggaaacgggtcgggttaaccgggtttatgtgtcggtgcgggacgactttttgtgggagtcataggtatccggaggttcatgcttgtacctcggccgcgacc

SEQ ID NO: 851 - DNA, 530 bp, Arabidopsis thaliana
tcatcactcactcatcatcctaaaacaaattttaatttttcttaactactccattattaccggccaagatcaaatacttgtcttttctagtgagacttgtgcactcgaaatccaacgccttcccaatatcactctgaacattgttggccacctcaaacttcaactttccatcaggatcttggcacgtggcaccggagacagggtcgagaaattggatggtgtaggtaggataaggatccaagaggaagaaaagcgggtcaagtgccttaagaccactcgccgttgtaccgtagaagaaggtcacgtgtaccgtcacagccacgggaacgatgacatcactaacctcggtgaacaaagggctaaacctaagcaggtaaggttctctacaagtggttccttcaggacaaacaacgagatctccttcggttaacaatttctccatggcttgaccgtcgctcacccgatcacgggtcagtctcaccgtcttgatcggagccaaaatctcagataccctactcaaactgcggccg

SEQ ID NO: 852 - DNA, 530 bp, Arabidopsis thaliana
  misc_feature (1)...(530): n = A,T,C or G
tgttttggagcttatattatctctatggcaacttcacctagtgatgtgcttgcggttgagcttttacagcgcgaatgccatgtgaaaaatccacttagagttgttccactctttgagaagctagctgatcttgaagcagctcctgccgctgttgcaagactcttttctatagactggtacaaaaaccgtattaacggtaaacaagaggttatgattggttactcagattcagggaaagatgcagggcgtctctcagctgcttgggagctatacaaagctcaagaagagcttgtgaaggttgctaagaaatatggagtgaagctaactatgttccatggccgtggtggcacagtcggaagaggaggtggtcctactcatcttgctatattgtctcagccaccagatacagttaatggctctcttcgagtcacggttcnnnntgaagtcattgagcaatcatttggggaggcacacttatgctttagaacacttcaacgtttcacagcagctactctagagcacggaatgaa

SEQ ID NO: 853 - DNA, 530 bp, Arabidopsis thaliana
taacaattattttggaatgtaccagttgtgttcgaaatgatattaagaaagaagccgcgggaatttccagatatattactcaaaagaatcggcataacacccctagtcgattggaattgagaaaattctgtccctattgttataaacatacaattcacggggaaatcaagaaatagatcaaattgagtgcttgtatgtcaacttttattttaagaacaggaataatgctagtatctatatattattacatatatataaatataaacaaataaatcaatagaaagaaatctaatccgatattcttaattctatatagaaattctatcctatatagaaatagaaatcgtttttattttgatccgatcaaaataggattttagagataaggaataaaaataaaaattatgaataaatctaagcgactttttactaaatccaagcgatcttttcgtaggcgtttgcccccgatccaatcgggggatcgaattgattatagaaacatgagtttaattagtcgatttattagtgaa

SEQ ID NO: 854 - DNA, 529 bp, Arabidopsis thaliana
ccacgcgtccgcgcgtcaactcaacatttagtggtcagaatatatgatgacgagggtgtacaagcatctgagcttattggttgtgcccaaatccggctttgtgaacttgaacctggtaaagtgaaagacgtctggttgaagctggtcaaagatttggagatccagagagatactaagaaccgtggagaggttcaccttgagctcctttacatcccttatggttcgggaaacggcattgtaaatccctttgtcacttcatcgatgacgtccttagagagggtgctcaagaatgatacaacagatgaagaaaatgcatcaagccgtaaaagaaaagatgtcattgtaagaggagttctctctgtgacagtgatatctgcagaagagataccaatacaagatctgatggggaaagctgatccatatgttgttctctcgatgaagaaatcaggtgccaagagcaaaactcgggtcgtcaatgacagcttgaacccggtatggaaccagacttttgattttgtagttgaagacg

SEQ ID NO: 855 - DNA, 529 bp, Arabidopsis thaliana
aatattgactcttctttcttttatataatgaataatgtaaaaaatttcctaatattcgtctaccttataaattagaagcacaacactctctcctcttcacaaatctcacatcctcactcctcagctcctcaaatcagaatgaatcaatccgcgcaaaattacttttccgtgcaaaaaccttcagagacttcatcagggccgtacacaagtccgccaccaattggttatccgactagagatgcggtggtgggtgatcctccggcagcagcagtggagacaaactccaagggcgtcaaccccgaaggatgttgtgctgccatatgctgctgttgtgtcctggatgcatgcttctgagacttcggaattaacgatttcatgcaaattattgatgtaataaaagagtatttgatgctagttatgttacctactctctgtttggaatatactctgtggatggttgttactatgttttatgtaagtgattatatatatatatatatatattccgttgaaaaaaaaaaaaaaaaag

SEQ ID NO: 856 - DNA, 529 bp, Arabidopsis thaliana
cggccgctatgattcatgttaatgttgttgatacaatgtgaagccaaataacaataaaagtattgataccaagatacatgatttcactgtaaacctttttggatacatttgtgttacacacttacacttgcacatataactcgtcgaacgatgagaaacaatggacttcctctattagatgaacaaaaacagattgagtctcttacttctataacttgtcggtccgaatgcatctcaaatccttgtcaaaagtaaagactttccctggcaacaattcggcagccgcagagattcctctgtacactattctggtggaaacaatctgttccgaccaaagaccaaactccacaaggttcccttccatccactttatactaaccgtcacaccgccccttgcccttagcccattcacaatgccgttaggccatttatctgctggaagtgccgggagcaaatatagatccttcgtagtgctctgcactaacatttctgctaccgctgctgcgaatccaaaattagcatcgatctg

SEQ ID NO: 857 - DNA, 529 bp, Arabidopsis thaliana
  misc_feature (1)...(529): n = A,T,C or G
tttttttttttgacacttaattatttagataatacttaaaaagagaagtacctaatacaagatcgtagttgaacatgaaaccagttgcaaatgacaagaagcagttatctcaaagttcaaagatctgtttttctctctgccttttgtctttcaacagaaaccaataaaaccaacaacaaattcccactaattttaaatgaaataaaatcatgaagcgtattcaaaggcttgtggaggttgtggctcatcatctacggccatagctgaggccggggttccttgtgcagccgctgctgtaccagttgcaggagaagctgttgaagttggtgcgtcggtcagagagagaacctctggctcgtgttcacgcaagtctttgagaagaacgaaacctgacggtgctagcttcactggtacatatctgctgtcatcaagtaactttatgtatttctcttgagctgggactactcgannngggttnactaaaatctcaaacgctggctcaggctcaggtgctttcttctcgaccgct

SEQ ID NO: 858 - DNA, 529 bp, Arabidopsis thaliana
ccacgcgtccggtttagcggaaaatggaaatgacaaatcatccacatattttgctatatatattttctaaacgtttcttacactgaaacaaccaatcctatacacaatggcttcaagaaaacctgttaatcgcccatccgtgaggcacgcgagtcacaaccatccgctgcgtgtctttaaagctcgagacgaagatgaggtcgtttgctctggatgcgagctcgagctaaccggacaagctttcaagtgtatgaagtcagattgtgattacttcttgcacaagtcatgtttcgacctacctcgtgaaaccaatcacaagtctcacccaaaccactctttgaccctgcttcattccccaccgtacggtcagtcttacacatgcgacgcatgcggtgagtacggatctggtttcacttacaattgttctgaatgtcaatatgatgttcatgtcggatgtgcttttatccctgagaccgtggagcgcgaagatcacgaacacccactcacgcttctctacaatacaccatgc

SEQ ID NO: 859 - DNA, 529 bp, Arabidopsis thaliana
  misc_feature (1)...(529): n = A,T,C or G
tcctcacttaacaagaaacgctaatgatacacaagacaaataataacttatgatgtatataattgttgcatcctgtgcttacaagcggagagtcttgagaacggtctcgtacgtgtgttggagacggcttctatgcacattgctcgttggtactattttcacaaaacgagccacatctttgnnncctttgtgttgtcttaacaacaaattactttcttcttcttcatctcctgccactaacttttgcttctcttctccaaaagattgtgttcgtgtcaatgcccattgtatagcccatatagcaagaggtctcatataacacagagatctgtattcatcattcatgttccacgcttctggtgtctgaaacgagcaactgagaccacgatcagaccaaatagcctcgtagattccacttgctgtctgaaaccctttttctctttgccnttcttgaatcatacaagctgcaacagagtaagtagtaccagcccaaacttcctttgaaaccaacgaatttgtatccactttt

SEQ ID NO: 860 - DNA, 529 bp, Arabidopsis thaliana
  misc_feature (1)...(529): n = A,T,C or G
cttttttttttttttttttttttttttttttttttttttttttttttttttttnnnttttttttttttttttttttttttaaaccaaaccaccaatttaaatttatattaaataattataccagcagaaattaaaatttaatcatcccaaatgactccaaaactctcccagaaacgtctttgccgcgtcaaggctcgggaaatacgtcggctccataaatatctgactcagtgagtcacacgactcttgactcgccgtcgcgttcatctccgcacttcccatcatagccgccactaactgcctatacccaaagaagaaactcttcgccgccgcttccaccgcttgcatcccctgaagcaaatgaatcttatcgcactctgtcttcctcgcgtaaagcttcatcgccgcctcttgtaatcttggtcctccggttggatctacctcaaccgccaagaccgccggtactttctgtctcagatctttcgacatcttcatcatctccactaatcctttagatctgaaacaaaac

SEQ ID NO: 861 - DNA, 529 bp, Arabidopsis thaliana
cccaaaaactttacattcttaacaatttcaaccctatgggcttacttgatcatctctgggatgatactgtcgctggtccacggccagagaacggccttggcaagcttcgtaaacaccataccttcagtttccgacctagctccggcaatgatcaatcggaagctggaagtgcgagatcgtacggtgaggattcgctaccggaagaagcagtgaaagttacacgtagtatcatgataattaaaccaccgggttaccaaggcagttcagctccagcttcgcctgccggttcaactccgccgctatcacctttctctccgccgctgtctccgttctctgggggaaaggaaccctttcggtttaggagacggtcgacgtcggatgcgttcgagaaggcagcaggaggatcagagactggaccaaggagctctcctcctacttacggcatgcgatctctaacacacaacacaagtcttgaaaaagagaagagaagaagaaaacagagtacccacccttaaacgatgtcgtttag

SEQ ID NO: 862 - DNA, 529 bp, Arabidopsis thaliana
ttaaacaaaccagaaactttcatatcaataatacaagaaaaaagaaacagagggatttgattattggtccatggtagatgtttaaagtaaaaagacagaagaaacataaaatcaagtttaagcttgaggtttgtcccacttgagtggcttcacgacctcccaggtgaagtcagggtcgtctcttccgaaatgtccatacgctgccgttttctgaaaccttccatttcctcctctcttcaagtccaagttgattgtcatcattcctggtctgaaatcgaatgtctctttcacgatcttcaggatctccttgtctggaatcaaccctgttccgtaagtgtcaacgaagacagacaatggctcgggtactccaatggcgtatgagacctggacaagagccctgcgagccatgccattagccaccacactctttgctgcttgcctcacgatgtaagctccacttctgtcgactttggttgggtctttgcctgagaaagcaccacctccatgagctccccatcctccgtatgtg

SEQ ID NO: 863 - DNA, 529 bp, Arabidopsis thaliana
ctttttttttttttttgatgaataaagaagtttactgctgagttttgttcaaagtacacgttaatcggatttatgaaacgacaattacacagactgacccaaaattggtaattgcggcatccgacttacccgaactgcatgccgttttgcaaaatctcaaaatgaaaaacggcatggtttcttagtaatctactctagttctagcaaactgacttgttcaattgcacatagagatgatcaactacaaacacagctaatgtttcaaactataagatgctgactacgtctgatgtactcaagcttgaggacgttccgaaattacggtgctttccatcggctaggttagccagagagtagccttgttcatggagttgattaatcaatagagtctctaactgacaagccatgctcttaccttgaaccataaggtatagaaaacttgacccttgcagtccttcctttgctcgatgcgcacgtattcgtccttcaagatcatcggtctgtccaatgtacaatctcttatcgggtc

SEQ ID NO: 864 - DNA, 529 bp, Arabidopsis thaliana
  misc_feature (1)...(529): n = A,T,C or G
gcggccgccttacgtacataaaactttacaagagtttttcacacctgaacgggttacacacttacaacaaacacacatcctctaaaacatggacgcatgttnanactctctctcacaacatacaagaacaaacaaacaaaaaccaaaccaagattttaaaaccaatcgactggtcaagtagcaactaacttatttccaatccagaccaagaaattcgaatctgatccattttaagtggagaggatgttaagaagagagactctagcttgtatcattaccttgaacaatccttcaagtccctcttcaagctcttccatggctgcctctacaccttcggatctaaccaatgcacattgaaccctctcagatacttcttcactaatctttttctcttcttcttgatcttcccttgtcatcatcacaacgagcttcccaagctcagattccatagcttcaagcacgagacaagaaaatcccgtctcgtaatctcttttctcctggtgatgatgttctattcctttcttcacaa

SEQ ID NO: 865 - DNA, 529 bp, Arabidopsis thaliana
ggatcctctagagcggccgccctttttttttttttttttttttttttaatggcatacaatttttctcataattgtcaaatcagtaaacaaaatctcaaatacgtattgaaaattgaaactacaacaaaatttaagggaaaatttagagaaaagctagcagcaaagcaacaaacgacttgacactccattttcatggcgacaatttcttcttcaaattcttgatagacttcactcctctacgagcagcgggtttcactttcttcttcgtcttcctacttgccaactccctcactggaccggccgggattccttgcttcagagcacttcctcttggtgtagcagacggaggacacctcaaatcttgtggaggtagagggcaatgaggcttccacaccaaattgttcttcattgcgaatcgtactctctttgagctcttctcactgctcgggccagctaagcttgtctctgctgcatctctgttaacagtactaacttgctcttcccctttgttctctcttttcctcttctt

SEQ ID NO: 866 - DNA, 529 bp, Arabidopsis thaliana
  misc_feature (1)...(529): n = A,T,C or G
cggccgcaatatatactagtatcacttccatatacaaaatcgttgaatattctatcgtatacatactctaacacagatcatatacacgccctctatattttgttgttgttttaaccctaaaatcgtataagaaaaaaaaagcgtgagacagccttaaacgcgtttgcgactcgcgtagcttttgcccacatagtgataataattactattgctctgatttttactcccaccactagagcttttaccgcgcagtaaatatgacaacgccctccacaaaaacgattttctccgtcgcggtgaaacggcaatcacgtgactagcatgtggtctcgttgacttcttaatcacaagacctctaacttcttccggtggcttataatgcctaatcaacggccacttgattccatcaaaaaacggatgacgtttgatatcttgcgcacccctggcgcatcctagccttttccttgggtccttnnncaaaagcttctcaatcaagtccctagcttcatctaaatcaccgtccatatgg

SEQ ID NO: 867 - DNA, 529 bp, Arabidopsis thaliana
cacttctcttttgattcgattctctctttaccttgaagcttcaatatcaaccaaatcttttttctcaaaatctcaaagaatctctcaaactcagtctcctatctgtctctctgcaaactattaccaaccagataatttagatatggaagctactcagaaacatatgattcaagaaggatcttcaatgttttaccatcaaccatcttcagtcaaacaaatggacctttctgttcagacatttgattcttactgcacacttgaatcctcttcaggcaccaagtctcatccttgtcttaacaacaaaaacaactcttcttcaaccacaagcttttcctctaatgaaagtcccatttctcaagccaacaacaacaacttatcaaggtttaacaatcattcccctgaagaaaacaataactctcccttgagcggttcttcagcgacaaacaccaacgagacagagcttagtctcatgcttaaagatttggagactgcaatgatggagcctgatgtagacaacagctataacaat

SEQ ID NO: 868 - DNA, 529 bp, Arabidopsis thaliana
ccacgcgtccgagaagacccatcgccgcaccgcttgagtcactcttcttcccggagaagaaagaaacaacaacaaacatattcaccattaccttcttcttctcctccttctccttcgtttctcactccaaatttggaaccctaaatcctaatatccttcgattagttctcttctctatcggaattcttaacgttgagaggagtctgatatttgccgtgactcaagagattccaggtgtttccgacgtatatatttacatatggcgtcgttggctctgacttctcctccctccgttaagattccttcgtatctctcctcgtcgtcttcgtctctcttctcccgttcctcgatttctttcaggaccactgagtctcgctctcgaatctgcgtttctggttacgcgaaatgcaatttgcctaaggcactaaacgggaacgctcgtgttccaattattaatgagacgacaattcctaagttctttgattcttcacggttggagaaatcggttagtagaaacaatactaagctc

SEQ ID NO: 869 - DNA, 528 bp, Arabidopsis thaliana
tcgagcggccgcccgggcaggtacaaatggcctatgaaccatgaacttcccatatacccgatgcagaatcgtcttcaaacactcccgttctctaggatcctccgaatcaaacaagtcaagcaacctcacaatgaaagcatgatctaaatacttttttgccactttagcatcaagacacggagaagtgataaacttaagcaacaaatcatacacaatctgcaaatgaggccaagcagggtcaaacatcggttcatcatcatcgttttcgccaccagaactagaccgataattcggaggaaagaccctaaagagattaacagcacacattctacacattgcaagaatagctggctcagtgaacttaacagaccctgaagctacaaaatccaaaagctccaacaatgtctgccttttaacatctttctctatagagtttttaccagggtcagagaaatcaaatgtcacacaacagagactaactttactcacaaagagattcaacttctcagagcttgtacctggccgcga

SEQ ID NO: 870 - DNA, 528 bp, Arabidopsis thaliana
cgggcaggtgatggacttaaacacatgcactctctggagccaccatatgctcacaacgatgtcaaacctggcaacgtccttttaacacgtagaaaaggacagcctcctcttgcgatattgatggactttggaagtgctcgcccatcacggaagcaaatccgttcccgtcaagaggccttacagttacaggaatggacatctgagcattgctcagcaccgtttcgagctcccgagctctgggattgcccaagccatgctgatattgatgagagaacagatatctggtcactaggctgcacattatatgcaataatgtatggtgtgtctccattcgagtatgcgcttggagaatctggtggaagtcttcagcttgcaatcgtgaacgctcagatcaaatggccaaacactggaccaaaagcttcttaccctgaagctcttcaccagttcgtaacttggatgctgcaaccacaagctgctgttcgaccgcgcatagacgatatcatcatccatgtcgacaaattgatcgct

SEQ ID NO: 871 - DNA, 528 bp, Arabidopsis thaliana
cggccgcggatcaagcaagtgtctcttcaggaaatataactgaagcaagtggttctaattacttccctcatcatcagcaacagcaagaacaacaacaacaacagttagttgttccagattcgcagactcaaaagaagaggagaaaccaaccagggaatccaggtttgtgtgaaaagaatacaaaaactttcatgctcttggactgattcattattccaattatttgatacagtcaccttcttggaaattctgtgtcttctcccgaaaagaatattctttttaccctttttgttctctttatcatcctctattccaaaacaaagaaaaataaaaccaagactcagactaaaaagaaaaattaataacttgttaaagtatattttgggctgtggttagtatagttttggttactattaagcattaatcattaaaatgtaactttatttagtgtttcttgatttttctaacaatggttcaataattttctttttaaaatttcagacccagaatcagaagtgatagctctat

SEQ ID NO: 872 - DNA, 528 bp, Arabidopsis thaliana
ctccgacttgtctcatcactgcaaagttctctctttattcctcgttctctgtttcgttaattttcacagagtaaagagattttgatacattggacccaaagtgcaattttcaaaaatgtttcgctggaagaattcttctcaaaccgaacaagagcagaaagaggcagctctcagagaggcaaagatgaaagagcttaagactctcataggtcagctttctggaaggaattcattgtattgttcagatgcatgtctgaagagatatctggaagctaggaattggaatgtaggcaaagccaagaagatgctcgaggagacgctcaaatggagatcgagttttaaacccgaggaaatccgatggaatgaagtttcaggtgaaggtgagactggtaaggtttacaaagctggattccatgacaggcatggaagaacggttcttatactgagacccggcttgcagaacacaaaatcgttggagaaccagatgaaacatctggtgtatctcattgagaatgctattctgaatct

SEQ ID NO: 873 - DNA, 528 bp, Arabidopsis thaliana
cggccgcgagaacatggatggaccaagtcatgaaccatgactattaattaagtcttcattgaaaaatctacatcaaagttttaaataaataatatcaagcttaaaatgaaccaccttccattatgtgacgatgatgtggaccaacaaaagaaatataccaatcacaaagaccagtttagtcccaaaactaccccttatcacttttttatagatcatttccattaatttcacaccaatcaaaatggtggatgcggcggagcaaccaccttctacctccgagggagaaagcctcctcaagatccacattgagaggatgcataagaagctgaaggaaccaccacggttgctcagttcggccgccgggaaacctacttgctccatcttccgggtacctcagagcatgattgattgtaatggaagatgctatgagccacgagtggtctcgattggaccgtaccaccgtggccaaacacaactcaaaatgattgaagaacacaaatggcgttacctaaacgttctgctcactag

SEQ ID NO: 874 - DNA, 528 bp, Arabidopsis thaliana
  misc_feature (1)...(528): n = A,T,C or G
aaataaaaaacaactctgctgatactgaaacaagccttacttattatcacacaacacaattattcacccacacgtcgttctgtataaaaacaccaaatcaacaatcactaatttattgagttttcctcaaaggaaagatatatctttcatgtcctcctcttaagaccgatacgcgattataagactctgaacatcatcaatgtccctaacctcatatcgagcaaagccagcttctttaagaacaaagtcccattctttcaaagtccgttctttgcctgtgcttgtgtgagccatcatcaccatatcaagcatcaatctcacgtgctctaacttttcatctcgttcgtccactatcatcgtctttttattctctccgatcaccgattccactatcaacacttttccgatatttggagggaccgcttctttgcaattcttcaatatctttatnnnatctttgtctccccaatcgtgtaacacccacttgatgaaaatggcgtcgcaagccggaatagaatcaaacatatc

SEQ ID NO: 875 - DNA, 528 bp, Arabidopsis thaliana
  misc_feature (1)...(528): n = A,T,C or G
cgtaaacaaacctacgtgatccacactgtcacaaccagtaccaaacacatcgtaacttcactttttaattcactccaaacagagaatatcaacgacgatgatttttctctcccggagattcactatatttacgagaatgccatgtctggtttctccgcgactctcaccgacgaccagcttgatacggtgaagaacacaaaagggtttatctctgcttatccagacgagctcttatctctacacacgacatattctcacgagtttcttggtctcgaattcgggatcggtctttggaacgagacgagcctatcttcggacgtcatcatcggccttgtggacactgggatctccccggagcacgtgagcttccgagacacgcacatgactcctgtaccnnntagatggagngnttcgtgcgatnaaggcacaaacttctcatcttcggantgtaacaagaagatcattggagctagcgcattttacaaaggctacgaatcaatcgttggaaaaatcaatgaaaccactgat

SEQ ID NO: 876 - DNA, 528 bp, Arabidopsis thaliana
aattaaatacacacaatgaccaaagaagtttgctccaacattggactttggttattgctcacgttacttattggtaactatgtcgtcaatcttgaagcctcgcaccatgtctacaagagacttacccaaagcactaacaccaaatctccttccgtaaaccagccctaccggaccggtttccatttccaaccccccaaaaattggatgaacgatcctaatgggcctatgatatacaaaggaatatatcatcttttctaccaatggaacccgaaaggagccgtgtggggtaacatcgtgtgggctcattccacgtcaacagacttaatcaattgggatccacatcctccagctatcttcccatctgcacccttcgatatcaacggatgctggtccggttcagctactattctccctaatggaaaaccggttatcctctataccggaatcgaccctaagaaccaacaggtccaaaacatagccgagcctaagaatctctccgatccttatctccgagaatggaaaaagtcg

SEQ ID NO: 877 - DNA, 528 bp, Arabidopsis thaliana
ctttttttttttttttgtctgaatcttgaattatttatttttccaataataatccataagctgagatatctggccacagctcagagaatgtgtaaagtttaagactctacataaaacataatggatatgggtggggtatatttagcagcagcacaaaaacaggggatgatcatcatctacaaaaagattcaagattctgtaatggcagcaacatgaagctgttgttgttgcatgaggaagaaatagcaatgcgcatctgagtgagttttagaagccggcccatccagcaggttgagctgttttctggttttctctcatctttgagttcccatatctctgtgaagtgctgtttccagagcccatagatctttgtgttccagatgcagaagtagcagctgcagacgttgcagcggctctaaaggattctgtctcgaaaccccatggctcaaaaccttgagtacctgcagcagaagctggtttacttctggttctcacagactgattaatcgtattattgcggacgcgtgg

SEQ ID NO: 878 - DNA, 528 bp, Arabidopsis thaliana
tttttttagtttcaagcaaaattatccggaaactgcataattgaaaaccataataaaaagtctcagagatatccaaaaaggagggagagagaaagtcacagaaataaagagaaaaaagaaaaaggctcaaacgccatcaaagttttaagaaccaaagaaaaccataagagagtcgatcataacgaaagtctcatcatttggcacccttcttcactgcagccttggtgaccttggctccagttgggtccttcttgtccacgctcttaataacaccaacagcaacggtctgcctcatgtccctaacagcgaaacgtcccaaaggtgggtactcggagaaagtctcaacaaccatgggcttggttggggtcatcttaaccataccagcgtcaccattcttcaaaaacttgggctccttctcaatctccttaccagaacgcctgtcaatcttggtcaagatctcagagaacttgactgcaatgtgagaggtgtggcaatcgagaactggggcgtaaccgttaccaatctgac

SEQ ID NO: 879 - DNA, 528 bp, Arabidopsis thaliana
ccacgcgtccgggttattgactttctcattcagtgaagcttgaatcatggcctcgagaattgctaaagatgtgactgaattgattgggaacactccattggtgtatttgaacaatgttgctgaaggatgtgttggtcgtgttgctgctaagcttgagatgatggaaccgtgctctagcgtcaaagacaggattggttttagcatgatttctgatgcagaaaagaagggtcttatcaaaccaggagagagtgtgctgattgagccaacaagtggaaacactggagttgggttagcattcacggcagctgccaaaggctacaagcttattattacaatgccagcttctatgagtactgagagaagaatcattctcttagcttttggagttgagttggttttaactgacccagctaagggcatgaaaggagctatcgcaaaggcggaagagattttggcgaaaacacccaatggttacatgcttcagcagtttgagaaccctgccaaccctaagatccactatgagactac

SEQ ID NO: 880 - DNA, 528 bp, Arabidopsis thaliana
  misc_feature (1)...(528): n = A,T,C or G
ttttttttttaacttgaaagtagataaaatgaaaaagtaattccaagagttaaacaaagggggcagtgcagtatcttataaggttccaacaacactttcagagggaacaaaactacattttaactacacattctagatcaaacagccactatcccacacgtagatgctgaccagcgcnnnttcattgttgaagtgcattttgtaaagttcgggtaatcttgtcaatgaattcatcctcctgcaacagggataaaagggcttccttcactttgtctctgctgataaccggaccagtgggtgcaggagcgagtgatggtggtggagttgggggtgggaaaggctggagcaccggagtaccatatgaccgctgctggtgactcgcattattaggattgagaggaggagcactgggcatagatacaccaggaatgaggtgtggctgtgccatcattcgtggggggccaaagaaagacggcgtcaccaaatctgtgtgaatgttggagttgctgctgataacttcagggttgt

SEQ ID NO: 881 - DNA, 528 bp, Arabidopsis thaliana
ttataatggttaatggtggtcctgtgatccaccaaggcaacacaatttccaatttattgtaataaaccaactatatttttaaaaaatgttcacacaaagtacaaaccaacgctctcttcttttatatcaacacaacatttatataacaatgcaaacacaacagtgatgattaattaaattacttgaaacataaaaactctgatgaaagaaaaagaaacgctgaatcagtcacaaagataggagaacacgacggaacagctgttcaaggagatgatgatagatggtaaatcatttggtgaggacataaatggcgtatatgatcccaggaatatacccaagtagcgtcaaaaccaaacatatccaaaactcaaccccgcaaccaaatctgagaaagacaccgagtggaggcaagaggatggcgataataatatcaacgaaagtagctgtactcatttttctaagctctttgaaagtttctgagaaaatattataaaagcttcaaattgtgttttttatccggacgcgtgg

SEQ ID NO: 882 - DNA, 528 bp, Arabidopsis thaliana
ccacgcgtccggaaaaacaaaagttcgcttactctctcgttaaagctctcagagagggtatctcgatctggttggttcctttaaccatctgtaactatggcggcagaaccgaaggcagcgactgctgaagtagtgaagatggatctgtttgaggacgacgatgagttcgaggaatttgaaatcaacgaagattggttggagaaagaagaagtgaaggaagttagccagcagtgggaagatgactgggatgatgatgatgtcaatgacgacttctcacgtcagttaaggaaggagcttgagaatggtactgacaagaaataaggtcgaagattgtgaaagacaggtcttcacatttaggaaatctttgttttcttttatgatctggaactttgtttgtactgcatcatttggtttatgttatcggttctgcttttcctttgcacattttactattccttggatgcaaatttcttatctttgaagataatacatttaaactggtaagatcaaaaaaaaaaaaaaaaaaaa

SEQ ID NO: 883 - DNA, 528 bp, Arabidopsis thaliana
tttttttttttttttttttttgcaagtaaagataataatacatttcttggaattagtttaacttttacaagtttacaatcaaattttttaaaaggtttaaataaaattacacatcctactgaatcatgtttctgaacgattttatacaatacatgaactagtgagacaatgagttcttcagtggcgttgtggcgtgtggaattcccaaccatcagagcatccaagctcacatccatcgaagcacaacgtgagccacggcctctgtccacaaatcatagctgtaaccgtctcttttcgacccgcgaatcgtgtttgtcccattccgagccaatgcagacccgcaaaagacggcttgcttaaccatctcagtgctccagtagttaagctcacacagttatggacattgagcttcctcaattgtttgcttcctccctctgcttgtctttcccatgtagccagggactctatcgaagaatctgttacgtgaaagcaactcctgatactcagctctgttaaagccttgcaaca

SEQ ID NO: 884 - DNA, 528 bp, Arabidopsis thaliana
gtcgcggccgaggtacagacttagtggacgcgttgttggcagcttgtcgggacaaaaatgcagagtataagatctctaggaaccatatcaagtcgtttttcgcggatctcttatttgcaagcactgacacctttgtgcaaacaacacagtggacagtggcggagatcattaataaccctaatgttcttgagagattgagaggagaaatcgattccgtggtcgggaaagcaaggttgattcaagaaactgatttgccaaacctcccttatttgcaagcggtggtcaaggaagggctaagactgcatccgccggggcctctctttgcaaggttctcccaagaagggtgtaggatcggagggttctatataccggagaaaacaacattaatgattaatgcttatgctgtgatgagagattctgattcttgggaagatcctgatgagtttaaaccagagaggtttctagcttcgtcaagatcagagcaggaaaaggagagaagagagcaagcaattaagtacattgctttcg

SEQ ID NO: 885 - DNA, 528 bp, Arabidopsis thaliana
tatctaaaccgtaaattcgtatgaagtaggttttataggctaaagaaagatgatatacatgaatctacatctttttacttgcgaaaaatccgttaacacacatcgtgatcggactgaactttgtttctcgggggcttcccaatcttcaaacaatcaatgggaggaagagtaggagtgttgagctcaccaaatgtctgccagcaataagcatcatacattcgatacttttcttgaaccggtttaagctctatcgacgataactgcacatctacacacgggaagttatcgctacaagcgaaatgcaccggtttcacggtataagttccttttatcctctcgtaagtcactccttccactgctactgctgatgtttggttcttgcatttgctatggtcacagtagaattggtttatcgttattggaatttgtacttggttgagctgaatgtttgagaaaattatccctttcactgatcctactcctccttgccatgtcttgattcggacacctgtcattgtgttgtgcata

SEQ ID NO: 886 - DNA, 528 bp, Arabidopsis thaliana
  misc_feature (1)...(528): n = A,T,C or G
gcggccgcgaaaatctctcccgtgatcggcgtattgtgaatgccgctcaccgagatattctccgattcttttccccagtgaggacaagtgttcagttgacttattaggaggtggggtttgaataagttacaatggcctcaattcttaatcaaacccaggagttgcaagaatcttctaaggttcttgggcatttaagatgtgaaaacttctttctattccccggagaaaacactttgtcagatggtttgaggggtgtgttatattttctcggtcttgcctactgctttattgggttgtcagccatcactgcacggttcttcaagtctatggagaatgtcgtgaaacattcccgtaaagtggttacaattgatcccattactaaagctgaagtcatcacatacaagnaagtttggaactttactattgcagacatcagtttgttggcgtttggaactagcttccctcagatttctttggctaccatcgatgcaatacggaatatgggggagcggtatgctggaggtcttg

SEQ ID NO: 887 - DNA, 528 bp, Arabidopsis thaliana
ccacgcgtccgccgatttgctctctcaaatctcaaatctcattccttgatttctcttggagacaacggatccaaaaccgacgacactctcaaaccaaatccatggagattttccagattccgattcagtttctccttctctaatcaatctcataagattcgcccaccaagtgtttgttgaaattcctgagagagagatgaaggattttccttcttgctttggtgaaaatggagttcaagttgcggattcatcgtcttcttcgaactccggtaaaaacgctcagaatttggttacttgtatctaccaatgtcgaattcgcggaagaaattgtttgatcactgtgacatggactaagaatctgatgggtcaaagtgtaacagttggtgttgatgattcttgtaaccaaagtctttgtaaagtcgagattaagccgtggctgtttactaaacggaaagggtctaagagtttagaggcgtattcgtgtaatatcgatgttttttgggatctttcgtctgcgaaattcggatc

SEQ ID NO: 888 - DNA, 528 bp, Arabidopsis thaliana
  misc_feature (1)...(528): n = A,T,C or G
cggccgcctatactcttcttctccatctctcaaacctgccaaaaaccattcctttaaagcattgccnnnnnaatctcgagattccttctctttcccacatacctccaaacccaccaatctaccgttgactctctcctcggctcgttctgtggcacgcgacatttctcatgcggattcgaagaaagagcttcttaaggatccggatgcgttgtggaagcgatacctcgattggttttatcagcagaaagagcttgggttgtatctggatattagtcgggtcggatttaccgatgagtttgtggctgaaatggagccaaggtttcaagctgcgtttaaggctatggaggatcttgaaaaagggtctatagcgaatcctgatgaaggaagaatggttggacattactggcttaggaactctaagctcgcacctaagcctactttaaagaccttgatcgagaacacacttgattctatttgcgctttctccgacgacataatctctggaaagataaagccaccatcttctcc

SEQ ID NO: 889 - DNA, 528 bp, Arabidopsis thaliana
  misc_feature (1)...(528): n = A,T,C or G
cggccgcggacaggtgtactattatccaggtttccaatcatctgttcatggagataagttaagacannnnnttgctagagaccttacaagggaaactgcgtgggaggcggttatgcgaataagatgtggaaaaggaattcgtttctcgtcctaccatgggaacttcatgctaaggtctactgacctgcttgctcttcctgctgttgactgtgacaaagcgtatgcaatgcagctatctcttgaggagactttgctaacatcccagactgtgtatttccaagtggctttgctatataccgcctcttgtggagagagacgtataagggtacacacatctgttgcaccagtggttacagatcttggggagatgtatagacaagcagacactggttccattgtgtctttatatgctagattagcaattgagaaatctttgtccgcaaaattggatgatgcacggaatgcaatacagcaaaagattgttaaagccctcaaagaatatcgtaatcttcacgcggtgcagcatcg

SEQ ID NO: 890 - DNA, 527 bp, Arabidopsis thaliana
gggagcagaaatgtctgaccttgttcagggtggtcttatcggacttttgcggggaatagagaaatttgattcttccaaaggtttcagaatttcaacttatgtatattggtggattcgacagggtgtctcaagagcactagtggacaactcaagaaccttgaggttacctactcacctacatgaaagactcggtttaatccgaaatgcaaagcttagacttcaagagaaaggaatcacaccctccattgataggattgcagagtctctaaacatgtcgcagaagaaagttagaaatgcaacagaggctgtaagcaaagtattttctctagacagagatgcatttccttctttgaatggtctccctggagaaactcatcacagttacattgcggatactcgtttggagaacaatccgtggcacgggtatgatgatttggcactcaaggaggaagtaagcaagcttataagtgcaacactcggagaacgggaaaaagagatcattcgattatactatggtctagacaaag

SEQ ID NO: 891 - DNA, 527 bp, Arabidopsis thaliana
ttttctagaaaaatataatattcggggtatgggggaaattcggcatagaaaatatttggattggagaattcttaacttttggtttacaaaaaaagtaactattgagccttgggttgatactaagagtaaaaaaaaatatattaatactaaagttcagaattatcaaaaaattgataaaataacgcagacggatcttgctaataaaaaaagaaacttttttgattggatgggaatgaatgaagaaatactaaatcagcgtataacaaattttgaattttttttctttccggaatttttcttattttctagtacatataaaatgaaaccatgggtcataccaatcaaattacttcttttaaattttaatgaaaacataaatgttaataaaaagatcattcgaaagaaaaaaggttttataccatcaaatgaaaaagaatcccttcgattttataatctgaataaagaagaaaaagaatcggccggtcaagtagaacttgaatcagataaagaaacaaaaagaaatcccg

SEQ ID NO: 892 - DNA, 527 bp, Arabidopsis thaliana
ccacgcgtccgaaatcagaaaaatgacttcttcagtactaaccccaagcttaaagcttttagctatgacgaattcttcctcttcgacccttttttgtattccttctatcttcaacatctcgtcctctgaatctcaccgcttcaatttttccttatcttcacgacccgttaatctcacactctctctcaaatccaaaactcttcgtaactcatctcctgttgttactttcgtttcccaaacttcgaattgggctgaggaagaagaaggtgaggatggaagcatcggaggtacttcagtcactgtagatgagagtttcgagtctgaagacggtgttggattcccggagccaccggaagaggctaaattattcgtcggaaacttgccgtacgatgttgatagtcaagctttagctatgctctttgaacaagctggtactgttgagatttcagaggttatatacaatagggacactgatcaaagtcgtggatttgggtttgtaacaatgagtacagttgaagaagcagaga

SEQ ID NO: 893 - DNA, 527 bp, Arabidopsis thaliana
ccacgcgtccgccgacaatggcgatagctatggcggttgtttctttcccatctctactcaacaagtcaaccttatcctcttcactctttactcccactttcctcccggcgaaatcctcttcacttctcatcaaatcatcacccaaaaccagattcgttgtttcatcatccatggaagctggaatcggagtaatggggtcaaaactcggaatgatgagtttcttcgaagaagacggcacagtagttccagtaacagtcgtcggattccgcgaaggtaacatcgtaactcaaatcaaaaccctagccaccgacggttacgacgcggttcaaatcggttaccgtcgtgtacgcgacaaaaagctaactaaaccggaaaccggtcatctccaaaaagccggtacaatcccaatgagacatctccaagagttcagattaacaaacatcgaaggattcgaaccgaaccagaagcttgtgttcgatgagatattcaaagaaggtgatctcgttgatgtagctggaaccacaatt

SEQ ID NO: 894 - DNA, 527 bp, Arabidopsis thaliana
agcaacaatggagatcaccactatcatattcctcatcatatcctctctcaccttctccatcttccttaaactcatcttcttcttctcaactcacaaactcccaccgggaccacctcgttttccggtcatcggaaacatcatctggcttaagaaaaacaacttctccgatttccaaggcgttctccgtgacttagcctcccgtcacggaccaatcataacactccacgtaggctccaaaccttccatctgggtcacagacagatcactcgctcaccaagcccttgtccaaaacggtgccgttttctccgaccgttctctcgctctccctaccaccaaagtcatcaccagcaaccaacacgacatccactcctccgtctatggctctctctggagaaccctccgccgcaacctcacctccgaaatcctccagccctcgcgcgtgaaagcacacgcgccgtcgaggaaatggtctctcgagattctcgtggatctgttcgagacagagcagagagagaaaggacatatct

SEQ ID NO: 895 - DNA, 527 bp, Arabidopsis thaliana
gcttcttccggcgttttctctccgccgtttcgccaccgtacgtgacaatgtctgtttctctctccgccgcctctcacttactctgttcctccaccagagtctctctttcccccgccgtcacctcttcgtcctcgtcccctgtcgttgctctttcttcctctacatcgccacattctcttggaagcgtcgcatcttcttctctgtttcctcactcctccttcgtgcttcagaaaaaacatccgatcaatgggacgagcacgaggatgatttcaccaaaatgtgccgcttctgatgcagctcaattgataagcgctaaagaagatatcaaagttcttctccggactaagttttgccatcccatcttggttagattggggtggcacgatgctggtacttataacaagaatattgaggagtggccactgagaggtggagctaatggaagtcttaggtttgaggctgagcttaagcatgctgcaaatgctggtctgcttaatgctttaaagctcattcagcctctcaaagac

SEQ ID NO: 896 - DNA, 527 bp, Arabidopsis thaliana
ctctctctctctagtggtcacactcacttcacacccgtgaaaaaaccctaggaaccaaatatggtgaacctctcgagatccgtcgcgttgatctctgtattcctccttcctttacttagcttctctttctccgtcgataatccgacggatcggcgtgttcttgttcttctcgatgatttatcactcaaatcctctcattctatcttcttcaacactctcaagtctcgtggattcgatctcgatttcaagttagctgaagattcgaagcttgcgcttcaacgatacggccagtacttgtacgatgggttgatcatcttcgccccatcaacagaacggtttggaggatccttggattcgaaatccattgctgattttgttgattccggtcgtgacttgatcttatcggcggatactgctgcatctgatttgattaggggtattgccacagagtgtggggttgatttcgatgaggattcttcagctatggttattgatcatactagcttctccgtctctgatgttgacgg

SEQ ID NO: 897 - DNA, 527 bp, Arabidopsis thaliana
  misc_feature (1)...(527): n = A,T,C or G
aaaaaaacagagcataaaagcagagtattaatgaagaaaacaaaaacaaactatagttggtcaataactgtattgataagcgaattcgttgacaccaatcatggcagaaacaacttgagagacgatatagaagctaccacctaagatgagtagaatgagaatggcggagattgggttcttgaggagctcaaagatgggctcaaagacagcagagagagctccagtgctaaccgtgagagcgtaaagaccgtaccttctaacgttgtcccaaaactcttccattaaaggaccttctggtccaagcgccatagctttctctgcatccattcccaataccaaaaccatcatcaaccctacagagactccaccaaccacagcatatctccagtgccgttccaaacccagaggaggaggttgtgctctttcaagcttgctgtttctgctacttttcgtagtcaatcttcttctggctgagcnacaccgaacaagacatgatgttctgttccttatgcttgagcttggaaaag

SEQ ID NO: 898 - DNA, 527 bp, Arabidopsis thaliana
ctcacaactttgaagaatgattacaaatctcataactttttccaagacgtgaaaattaaaaagaagaaaaaaaaagaaacacatttgtagaaaacactaaacagaatttgcaaagaaacaataatgagaatcatcaactgtggaaacagtttcttcagaagaaatcaaactcaagataattactctgatcagatcttacactcgaagatgcggctgctggcacagtaggagtaggattcaaagcttcaagatcaaccggtttaggaatctccggtggactggcacatcgaaccagagcccaattcactccttcaaagaaaggatgttgctttatctctgttgctccacgcttataagctaatctatgttgtggctccttcacaagcaaactccttatcaaatccctagctgcgaagctaacaaccggagattcagggaatctaagaggctgaccaaccacgttgaagagcgttgctcgatttcctgaccctttaaacggtgttttaccaaacaatagttcataaaga

SEQ ID NO: 899 - DNA, 527 bp, Arabidopsis thaliana
ccacgcgtccgggtttcttcaagtttcaatctttttgcaatgaattgcccagccatgactgcttctccttcttcttcctcttcttcttcctactcaacgtttcgtcctcctcctccactcttgccacaattgagtaacgattcacaaagatctgttgttatgcactgcacaagattaccctttgaagcatttgctgctacttcatcaaaccggcttcttgggaaacattcattgcctttgagagcagctttggttacttcgaaccctttaaacatttcatcttcctcagttatctctgatgccatttcatcttcctctgttatcactgatgatgccaaaattggtgtcttgttattaaaccttggaggtcctgagactttagatgatgtacaaccctttttgtttaacctcttcgccgacccggacattatacggttgccgccggtattccagtttcttcagaagccattagcacagtttatatcagtagcaagagcacccaaaagcaaggaaggatatgcatctat

SEQ ID NO: 900 - DNA, 527 bp, Arabidopsis thaliana
  misc_feature (1)...(527): n = A,T,C or G
taaatggccaattcattaattatggacgtgtacatgtaaaatcgtttttcaacttcgccagnaatccaaatcaaaatttctttacttgccaaactacgaagctgtggtggaggccatattacgcttttaaattagcctacaatagccttgcaggaaaaccattgcaaaaccgattcaatagtttgaggtacacgaaacgttcattcagaataatcatcctcattaccatcactatattgattggcatcttgttccggctcgtgtttccaagatctaccaaggccgccttcgtcctctaatcttctcatcttggagctcgaagcaccaaccctagaagagtaaacccctgaatctttatgttctatcactgatacagttgatctccgccttacagttacccttgaaggtactggaaagtgttcaatctcatcagaagatcttccttccctggcccttttcttcctcaagttcaacctcatgggtaggggcagatagctagcggtcccattgtcaaatgataccaggta

SEQ ID NO: 901 - DNA, 527 bp, Arabidopsis thaliana
tctagagcggccgccctttttttttttttttttttttttttttatgcaaagtctttatcacaattatgaccattggattgtgttttacataaaagagtttgtagaacttcgaaaattataaaaaaaaagaatatggtaaaataaatggaaacagattcaatattgtagatgactttgtacatcgttacacaaatctatctaacctatctaatcataatagacggtgaatattgattcctggaagctcagtttacgccacgtgtccttgggcgccgaaatcaacacctagacaaaagcctgttgacttgtagtaattcctttttttactcccggttaacattaaaccaatcagacaccaacacgtgacaagtcacctactctcttctcctccccgttcgatatctgactcggtcatctgtatccggcagcttaacgtcggcgatagcggcggagctccggcgataggagacgaagcgcttcttctatctctactcaacatccgagtgaaagataacatccgactcatc

SEQ ID NO: 902 - DNA, 527 bp, Arabidopsis thaliana
cgcgggcggttcaccaaaggaagacgagaggcagagcaaagtatcgagcaagaaggaaggagatgactccgaggatttgaagttttggatggataagaatgggttgccaccttgcaaggttattctcaaggagagaccagctcatgatcagaagcataaacctatacattatgttgctgctagtgaggatcttcagaagggtgatgtggcgttttcagttcctgattctctggtggtcactctggaaagagttttgggaaacgagactattgctgaactgttgacgacgaacaaattatccgaactggcttgtctagctttgtatttgatgtatgagaagaaacaaggaaagaaatcagtatggtatccctatataagagaacttgatcgtcaaagaggaagaggtcagttagatgcggaatcccctttgctgtggtcagaggctgagttagattacctaactggtagtcctaccaaggccgaagttcttgagagggctgaagggatcaaaagagaatacaatgagc

SEQ ID NO: 903 - DNA, 527 bp, Arabidopsis thaliana
ccacgcgtccgcaaagctttggactctcaggccaggaagactatgggattgggcggcgatcaatcctttgttcccgtcatggattccggccaagtccgcctcaaggagctcggctacaagcaagagctcaagcgcgatctctcggtcttctccaatttcgccatctccttctccatcatatcggtgctcactggtatcaccaccacctacaacaccggtttaagattcggcggcactgtcactctggtctacggatggttcctggccggctccttcacaatgtgcgttgggttatctatggccgagatctgctcctcttaccctacctccggtggtctctactactggagtgctatgctcgctggccctcgttgggctcctcttgcctcttggatgactggctggttcaacatcgttggtcagtgggcagtgacggccagcgttgacttctctctggcacagttgattcaggtgatcgtccttctctccaccggcggtagaaacggcggcggttataaaggatcaga

SEQ ID NO: 904 - DNA, 526 bp, Arabidopsis thaliana
tatctcttcttttaatgcaaaggacgaagtaaaaaaatattgtttgtcaaaaaaagaaaacttataatctttttacccttaaatgttatttagttttttcattatatattcagaaataatgaattgggtttttataggcatttttgatgccgctattgaaatagcttttcttgctatattttcgggtacaccacccatttcataaaggattttacctggtttaaccacagctacccaatactcaggggatcctttcccagaacccatacgcgtttccgcaggtcttactgtaactggtttgtctggaaatatacgtacccaaatttttccaccacgtcgtacatttcgtgtcattgcgcgtcgccctgcttctatttgtctagatgtgatccaagcgggttcaagtgtttgaagagcatatctgccaaaacaaatacgattcccacgagaagatattccttttagtcttcctcgatgttgtttacgaaatctggttctttttggactaagcatagcaattatatca

SEQ ID NO: 905 - DNA, 526 bp, Arabidopsis thaliana
gtcaactaccgtgagagtatctccaaaatagctgaagtgaaatacacacacaagaagcaatcaggtggacaaggtcagtttgctgatattacattccggtttgagccattggaagcagggtcaggatacgaattcaagagtgagatcaaaggaggagctgtgccaagagagtatattcctggtgtcatgaaaggacttgaggagtgtatgagcaccggtgtgcttgctggtttcccggttgttgatgtccgtgcttgtctagttgacggatcttaccatgacgtagactcaagcgtgctagctttccagcttgctgcaagaggagctttccgtgaagggatgaggaaagcgggtccgagaatgcttgaacctatcatgagagttgaagttgttacaccagaagaacatcttggtgatgtcattggtgatcttaactcacgaagaggtcaaattaacatcttcggagacaaacccggtggtctcaaggtggtcgactctctggttccattggcagagatgtttcagt

SEQ ID NO: 906 - DNA, 526 bp, Arabidopsis thaliana
acaaactatcttagtaacacaacgaaacgaaatcaaaggtgagagaaactacaaaactcgaaaaagtatcatcgcattttacaacaagtgtagagatccatccagagaattctattgattgaatgcttttcaaggcataccaaatttggacaaggctgtttcaaatacggttgtgaatgcttgacacgtactctgctcgtctgctttcacttttatctgagctttggctgatgaagtgtttatgatacactcagtgagatagttcgatggttctgattccttttgagcgaaaaagaagaacttgaagtttggagattgaccgcccgatgcgatacagtgaatggaatgactctgcatgtgtttgataagtgattgtggaactgttaaggccgcgattccctggggattcacagaacactcctgtgttagtgatattggcaattggcgccatttttgttggaaggcgcctggatctaaagcagctcttgcgttaagtttcaaaagaggcggtgatggtgttggagca

SEQ ID NO: 907 - DNA, 526 bp, Arabidopsis thaliana
ctccgctttagattctcagcttttcctccgattcaccattgaatacctcctcgtttacccacccgtttccgacccggagtattctctctccggtcgtctcaaatccgctctctctcgcgctctcgttccttacttccctttctccggccgcgtccgagaaaaacccgacggcggcggaggtctcgaggtcaattgccgtggccaaggtgctctgtttcttgaagccgtctctgacatcctcacgtgccttgactttcagaaacctccccggcacgtgactagctggagaaagcttctttcgctccacgtcatcgatgtcctcgctggtgctccacctctcgtcgttcagctcacttggctccgtgacggtggtgctgctttagccgtcggtgttaaccactgcgtctccgatggaatcggtagcgccgagtttctcactttattcgccgagttatctaaagactcactgagtcaaaccgagttaaaacggaaacatctctgggatcgtcaattgcttatgccgtct

SEQ ID NO: 908 - DNA, 526 bp, Arabidopsis thaliana
gtccgccgaaggttggtgttaagctggaaaggttggtcttttagaagatatggttcttgatgggattgtatcatcaccattacggaggccacatgctcttaagaagcaatgggatgacttgggtagctgctctactgttgtccagaggcatcgtttccttttgactgctatgcttcttttggcattcctctgcaccatttatatctactttgccgtcacactaggcgctaggcacttgttgtgctcagggatgactggaaaagacaaggcaatgtgtcaaatggaacacatccaagccagtttctccaacggaaaactgaaattcttctagagtgtcagcctaagctgattgcattatataaacatttgtctctctgttgaaatgtgtgtgtaatcgcctaaagaatggcttgtaaacccatcagaatctacacgtaccttattctactttgattatgtcccaagattcacagttattgtacaaatatgaatcttctgtaatcgaatatatatgctaaaagttttg

SEQ ID NO: 909 - DNA, 526 bp, Arabidopsis thaliana
gcggccgctcttcctctgttttgcagatacttctttcttcattgactgtggaagtcccgaaacttctacagacgtattcaaccgtacatggcttcctgatcaattctactccggcggaagcaccgccgttgtctccgagcctcttcgattccatctaatcgccgagaaaaccatcaggcactcttgttttctcttggagatctccttggccggagagtcttctccgcgatggctcttattctgatctctttgcttttatcggtgacggtgagctcgatttgtgcttttatagcatcgctactgatcctcccattgttggttccttagaagtcttacaagttgatccttcttcgtacgacgccgatgggactggtcagaatgttttgttggttaactatgggaggctctcttgtggttcagatcagtggggacctggattcactaaccacaccgataatttcgggcggtcgtggcaatcggacgaagattttcgatcggaagattcgagatcggtggctaggtcgtt

SEQ ID NO: 910 - DNA, 526 bp, Arabidopsis thaliana
tcttctagctctctcatctcttcttctcgccatagcttcaccttccttctcaagctgtacagttaaagcttaagattaattttcgttaattttaaattcgaagaaaagatgaatcactttgcggttcaaccaaacgcgttcgctgctggcggagatttgagaagcagctccgtttcagttgttgaaagagatcaaaccaccgtcgtttgtccaaaaccacgtcgtattggtctccgtaacaaccatcaccatccttctcgatctctccgttgttacttcagtcatcaattggagctttgtgaatccaaagcagagactgatatcttagatatcatactcaccaaggatggttatggtgcagaacaagttaataagcaggtaatagactcgccgtccccgtttttatgtgggtcgccgccgagcagagtcgctaacccattaacacaggatgctcgatttcgagatgagattgtatcggtttcttcagtgattccgcctcagttgggtttacctccttcttcatctc

SEQ ID NO: 911 - DNA, 526 bp, Arabidopsis thaliana
ttcaccggagtattaaagaagatgatgatcggagaaactcgcaggacttatcccactgttgaaatacctccatggccggtacttgaagagcttacaacgtcggagtttttttctccggtgatgaatagtccagattgtagcatgcttgaagctttggcggggttgcagcgttatttgccgtctaacgaaccggatccggagtcatacccggatctattgggtccggattcaccaatcgatgcttactcatgcgaccatttccgtatgtacgatttcaaagtcaggaggtgtgctcgtggccggagtcatgattggacggagtgtccgtacgctcatcccggagaaaaagctcgccggagagatccgaggaagtaccattactctggtacggcttgtcctgattttcgtaaaggtggctgcaagaaaggtgactcttgtgagtttgctcatggtgttttcgagtgttggcttcatccagctcgttaccgtactcagccgtgtaaagacggtggtaactgtctccgga

SEQ ID NO: 912 - DNA, 526 bp, Arabidopsis thaliana
aggtacggtaacgagaaggatgaagccaacactcgaaaactccatgagagaactcacatgaatcacctcttctacaactacctttacgaaactcaggacaagcggtgccggagtaatgaaactttctcggatcacgtcgtcgagctttttctccgggatgtgcgaacggacactccgtccaatcatgagatcgacctcgagcgcatcgccggattttgaactcgtagatgcgaaactcgtcggaggagaatgagtcggtgagtggtgatgactcgtcgccgcttgatgagtctgaatcgtttgttaactcgtttgacgggaggtaacggaagagagaagcgaaggagtcgagatacggtgacggagagtgtgggtagtcgttaacgccgttaaggttgacggaagagaatggtgaagagatcgtggccgttggatcgttgatttgatcccattgagggatatggatcgttggatgtggccggtttttattttcgccgatcatcatttttgacctgcccgggcggcc

SEQ ID NO: 913 - DNA, 526 bp, Arabidopsis thaliana
  misc_feature (1)...(526): n = A,T,C or G
ctttttttttttttttgcggatcaaaacaagaactttaaaacctctcggtaaaaagtacaaattaatggttactctaaacggaaaggcacaggagatttgttatttatatgatgttctcaaacaaagaaaagctactcacacaaatcacatgttgccaactttaagctaaagacccaactcttttctttacgtgtaacagaaaagtggcgcaatgaccttcaatggcttagctcttgacttctcgatggtttgagtttgatctcttcagcgccctgtcatggtttagcattgcgcttacgctctcaaccacgaaaacgatctgaaagcacgcgtnnnngatagcgtttccaaagtagaaatttgcatttccggttccccgccatatccagagattgtgcatcacagggctgaggagagagatcccgagatatccacagaagaggaagaacgagaacttcatatctaataactcattgacaaacaatgcccataagctcaagtataacgccgaatctccgactgaag

SEQ ID NO: 914 - DNA, 526 bp, Arabidopsis thaliana
ttttttttttttttttttttttttaagaaaaaagcttttctattagtaacaatagcaaataaaaacaaggctcaatccaaataacccaaaatacaaactgatcatccttggcctgtgaatgtaaattgtcttcacactctgactactagagaaattgaatcaatgaaatctttgtcactaaagttacaaacacacaagagatatctgttgttatgtatgaaatatctctcaattggcctcttcctcttcctcttcttcctccatgttaggatcaccagcttccccattgctctcttctttttctttctgggggcttgaatttggatgactctcctccattaattcaccttcttcgtctgatgacgataacgcccttcttcgccttacacccgaagtaggtacctcatcatcatcaacatcaggatcttcgagcccagcagcagcgagaagatcatgagcatcatcatccacaggttcctcagcttcttgagtagtcatctcatcttccctgttataattagtgttg

SEQ ID NO: 915 - DNA, 526 bp, Arabidopsis thaliana
cttttttttttttttgtctttagcctgttcattgtaataagactagaaaaaggattcaatgtctttaactctaagaaccagacccttcaaaagatttattaggacagagactcatatgaacaatacggcgaaatacatgttcatatttgcatttccatcaagatcaaaatggtggtgattcaggattttaccgcacaggctgttggttatagtgattcttctccttcttctttgccgcggccagcttcttacgtcttgcagctgcctcctccgcagcagctttagctgcagcatccacctctttgcctgacttcttcttcttcatggatgcaagcttctttatcctttccttgacgtcaattggagattcttcctcagttggttcagacccagcagcttcatctacagcatcggcattgttgtttgcttgttgctcttgagattcttttacctccttctgcttatccttctttttcttcttttttgatgcctttgactccccacctgctgcattccggacgcgtgg

SEQ ID NO: 916 - DNA, 526 bp, Arabidopsis thaliana
tttctcgttaattttgtttgacttgcctcttcgaagcaacctgattctgtggtctgaatcttttcaagggaagagaagataagctaaacaagagaatggtgactggttgtgttgatcttcatcaatctttcaaatctgcagattcatcttctgtgccaattcctcctcctcttccatcaaaatctgatggactcaagaaaaaacttgggcatagcagcgtttcgacagccacaagagatatgtgggatcgtcttttcaatgacggatacaaagctgatgtagtcatctacacagataatggcagtatcatctatgctcatgccaacatccttggaactgcttccactgtgatcaaaggcatgttgaagcaagccaagagacatggcaagtggcatacaatatcaatccgtggtgtccctcatgatgctgtgcgagtttttatccgtttcctctactcttcttgctatgagaaagaagaaatgaacgagtttatcatgcatttgctacttctgtcacacgcgtacgt

SEQ ID NO: 917 - DNA, 526 bp, Arabidopsis thaliana
tatcacaatatttactatttacaatggcgccacaagaacaagcagtttctcaggtgatggagaaacagagcaacaacaacaacagtgacgtcattttccgatcaaagttaccggatatttacatcccgaaccacctatctctccacgactacatcttccaaaacatctccgaattcgccactaagccttgcctaatcaacggaccaaccggccacgtgtacacttactccgacgtccacgtcatctcccgccaaatcgccgccaattttcacaaactcggcgttaaccaaaacgacgtcgtcatgctcctcctcccaaactgtcccgaattcgtcctctctttcctcgccgcctccttccgcggcgcaaccgccaccgccgcaaaccctttcttcactccggcggagatagctaaacaagccaaagcctccaacaccaaactcataatcaccgaagctcgttacgtcgacaaaatcaaaccacttcaaaacgacgacggagtagtcatcgtctgcatcgacgacaa

SEQ ID NO: 918 - DNA, 526 bp, Arabidopsis thaliana
tttttttagagaaaaggggagcaaaagcatatggttaagcttttgacactcccatgaatgatgaatctatatgaaagaggaagaactaaatataatatcatcatgattttgtttttgataatataaaatagattgaaaaagagaaacaaataagaggaacctttgaaaggatggtttaaacctttaaacctttattgattctctcggtttaaaggtttttcaacaacctttgacaagatgaggaacacaaatagggaagatatactttgattttcttgcttgtctttgtcttgatctcacccatgagaaacatccaggtcctctcttcttcttcttggtcttctcttcttcttcttgttcgtcttcttcttctttatcatcttcttcactcatatcttgcttctcttcttcttcttcttcttcatcttcttcgttgctcatatcttgcttctcttcttctttttctttctcttccaacttcacatcctgttgttgacctttcactttgagattgatatccacttgc

SEQ ID NO: 919 - DNA, 526 bp, Arabidopsis thaliana
aagccaaagccaaactcttggtaaaagcttcaaatcttacatttatataacttcttcctaacttacaaacacactacatagagaactagaagacatcaaagtgcaataaacgcctagaataagatacaatataagacttcatcacagctgaacactttttatagttgcttcatcccaaatcaatatgattctcttcattcttcagtcccttcagaattcagacacagtcccagattcaaattaccagtttttgcttccttagtttggtccgagtctgttaggttcatgtctagctcaacagctttaggtaatggagattcagtgtcgaattcttcagtctcttcaatttcagaatccttagaaatcactttttctctatgctcaagcatcgcaattggagcgtatctgaatcttcgcttaggcggctcctccgtctcaccggaaccattagcgtcggaggcagtaaccgtcgctgaggtaagtggagtccacttatggagaagtagatggtgtggcggacgcgtgg

SEQ ID NO: 920 - DNA, 526 bp, Arabidopsis thaliana
tttttttttttttttttttttatagcaacaaaaggattcagcattttcaacacaaaactaaatataagtatagcaaacgtgagaaaacactttctctagtctcaccacaccaatgtaacccaaactaaagttaaagttgagaaaatatatacatacagttacctaactagatgtttgatcaaactgaactaaaaccatattgaagttaaccttttgattttatttcaacaagttaacctgaagatgtgtctgaggaagaagcatcagcttctgcttctgtattgttcctcttcattttcttctttctcacatgttcggaagaagaacataagccagaagtggaagagtccaagctaacaaactcgtcgtcggaagaagacttcgagttcgaaccatcaccaccggaatcagaaggatgaggactcaccgtgattttgattggcggaggaatcgggaacagaaacttctcgaaatcaaaagaaccgagtttgtttttcgattccaatcgactttggcggacgcgtgg

SEQ ID NO: 921 - DNA, 526 bp, Arabidopsis thaliana
ttatatctgaaaatttctagaaaaatgagaaaaaaatataaactatatattctacagcctgcgtgactcctgtggtttttcttttccctcttgttttctctttttacccctaaaaaaattatggaagttgcaacaatctgtacaaatagagagagacttgtcccatatattttcatgtcacaacaaataagccttgactttccacaagatttcattccagaaaatccttggctgagatagccaatggaaaatgcctcttcttcctctttcaaatatccaatactcatcttcacagctgtaatgccagatccggatgctgcgacgaggacgaaccagtctgctgattagagcccggggagtttggtgagactagcctagcgttaaggtctggcggaaaccggtggaattcttgtttggggtaaggaaacaatgagccttgttgttgcgagaccggtgtggcctcgttgcttacgtttggttgttgctgtctagcaattccgagcatctgatttgcattatggttgaa

SEQ ID NO: 922 - DNA, 526 bp, Arabidopsis thaliana
cggccgcattttgatagataatgtcagaatgtgcaggacgctcatgcctggagatgaagaaactatgagtgatgaagccatatgggaaacacttcctcatttctgggtttccatatctatggttttcttcattgccgcaacaaccttcactcttcttaaattatgtggtgacgtagctgcgttgggatggtgggacttatttataaacttcggaatagcagagtgctttgcgtttcttgtctgtacaaagtggagcaatcagtcaattcataggtattcacatataccggaacctagctcatcttcaatggtagtaagatatctggattggaacagaggtctagtagtaaccgctgacgacgagcatcagcaaagcaacagaatatgtggtctccaagatattggtggacatgttatgaaaattccatttgtgacctttcaaatcatccttttcatgcgcttagagggaacgccagcttctgccaaaaacattccgattttagttctgtttgtacctctttttctg

SEQ ID NO: 923 - DNA, 526 bp, Arabidopsis thaliana
ttcgcggccgcgtcactcttctttctccagtctccgcgtctacctcaactctctttccgcgacgccttctcgcttatcccgccgcgctatttccgtctccacctcttccgacgagatgagtcgcgtccgcgccgtctccggcgaacagatgcgccgtactctccggtggtacgatctcattggactcggaatcgggggaatggtcggcgccggtgtctttgtcaccaccggccgtgctagtcgtctcgacgccggtccttcaattgtcgtctcttacgccatcgccgggctctgcgctctcctctccgctttctgttacaccgaattcgccgtccatctcccggtcgccggcggtgccttcagctacatccgtatcacattcggtgaatttccagcatttttcaccggagcaaatcttgtaatggattacgtaatgtcaaacgcggccgtttcgagaagcttcaccgcttatttaggaacagctttcgggatctcaacttccaagtggcgattcgtcgtctccggt

SEQ ID NO: 924 - DNA, 526 bp, Arabidopsis thaliana
acatcctaagaaaatccaaatccatgatataataatctaattacatacaaatatatagaattttataacacacgtacaccatttaattatgatcaaccaattggtcttagtttaatttaataacttcctcttcttcttttctcataccattaaccttatcattcctcacctgatccaccgtaggaccataggaccagctacacacaacgtagtagatgacattaacgaagctcaagatcgctaaaacccaatagtaatagtcatagtgacccttgttgatgttatcttcaatccagctcacattgccctgctttgagctattctttaccgcatttaggatcacactagccaagatattagccactgccattcctagaccgaacaacgaagctgcgatactcgacatgcttttaggaaactcggtatagaaaaactcggtctgtcctatcccggtcaaggcctctgctaaaccgtgtagtacatactgtggtacaagccacattgctgagatgctcactgttgagtt

SEQ ID NO: 925 - DNA, 525 bp, Arabidopsis thaliana
tttttataaaaatattattttcatagcaagatctgatttatttgacaaggaactcggagacattgatgatatattcatgattcagacaacaatctagtctcgaggtcgcgtgtgtaatcttcaacgaacgcagtgtatctggtagggggaggaacgtcgtcatttaacttctcgtattcccatgtccactttgcaatacaaactttatgatccttaggaacaacgtcaagtgttatcttatagctcttatattgctttaacacatctccttcaagagctaagaaagacaccgacttgttctcttcatctacgtctatcttctctttgatctgctccatttttccatcaacgatgaaattccagatctgaatagaggagttggatgtgggatcgtcacgatgaacataaactgcctctgtcttgtccgtgaaatttccttctttcttcttgaaagtcttgaagaatctctcggcggtcatattcacttggatctctaattcgagagtctggacaccagccatggct

SEQ ID NO: 926 - DNA, 525 bp, Arabidopsis thaliana
  misc_feature (1)...(525): n = A,T,C or G
cgcccgggcaggtctttcacggaacctcttcatcttcgtctctctgtcttttttcttctctcaacgccgttgattcgccatcgtcgctaccgattgtcttgaggtttacgacttttggactaatctcctctgtggagagcaatgactaaaactcgtgggactgatatgacaaagaaaaagggtaaacatgtttctgaaatggatttcaagactcatcagcatactgaatttttcgataagttgatagagctcacgcctgctagattctacttacctgatgagacagaaaggaaatggtatccaggtcttagcaaggctcaaaaagctagagccaagaaaaaaacaaatgacaacctaaagaaggcgaagagagataagttggacccagagaagtctgctttgacgactctcgatttactgaaggagaagatagagaaggaaagattggcttcacagaagcagaagctnnngaagaaacacgcggatttacgggagcagaagctagagcaggaaaaatcaggtacc

SEQ ID NO: 927 - DNA, 525 bp, Arabidopsis thaliana
tagtgcgtgacgatcctcttcgctctcacgctcgctgcctcagccttcgctttcattcctcctctcaccatcattcatctgcaccatcgtcgcctcgctgtcgacttgaactcaagggtcgctctttctcatcccatcacttcatcatgctttccccctcctggctccccctctgctccatccctgaacccttgcccttctctgcctcaccctccacctcgatctcgcgtgatgacggcaagcagcaggaggccagtcgagtgcacggcgcagcagcctatcgtctcgagtaaacttctccctctctctccgccttctccatcatcacctgacgaatgatctcccctcatccttcattccgtcatcctcgtcaacctcgatcgctgcggcctgctcctctgtcctctctctcctccttcgacctggacgccgactctgacctccttcccccgtcagtccccgctcctctctctcgtcaacctcgcttcatgctgccctcgactcccccttcccctctctctccat

SEQ ID NO: 928 - DNA, 525 bp, Arabidopsis thaliana
tgtcactgccaagattctagatttggatttgttttcaagagctgtgaaagtttataccaaaaatggtaatgctttgacggattccttgctgaaatctgtcttaaagtccttgagaagcgtggatagggttgaacagagcaatgagctgttgaaagaaatgaagagaggaggctatgttcctagtggtgatatgcagagcatgattgcatcaagtcttagccgtaagggaaagaaagaggaagctgatgaatttgtagactttatggaagcatccggaaataatctagatgacaaggcaatggcgtctcttgttgaagggtattgtgattccggggatcttgatgaagctttagtgtgtttcgagaaaatggttggaaacgagggggcctcctatgctgattatgcatttgagaagttggttcttgcttattgcaacaagaatcaagtaagagacgcatacaagcttttgagtgcacaagtacagaaaaaacagctgaaacctcgccatagcacgtacaaaatctt

SEQ ID NO: 929 - DNA, 525 bp, Arabidopsis thaliana
cggccgccttaagcctgttactttaaaacgtgatatgtacattcaaattagatttaacagaatctcttgtttcttcttctcagataaacagatctattcaactaaaaattttgaaccgggaaatgatcactcctggttttatcttaaccggtttccatgaggcaaagagttttgcttgtaggagaaggcaccttctttcctttcagtctcttaacttaaacgggcaatcaaaaactcttcagtgttctgtaggcaaaagattgtttagcgagaaccggatcgtaacatgaccgttggtgttccatgctcactcaagcttccggtcgataatctcctcatcttttgccagaaactcttgcctcgacccgaggtcaagggacccgagttagactgtctctcgaacctccctgaccccgtgtacatttccgatgtagataatcctctctctgtatcaggctcagagtcgtaatttggtagcaatggataccgagccatccttgctgagctgtcaccacaagagctctc

SEQ ID NO: 930 - DNA, 525 bp, Arabidopsis thaliana
gcacaaaacaatgaactcgaagaagataagctatagtgagatcaaaacttctggagaatagtatccactaacacaaaaatagccaaacgaagaagatgattatgaacatatataaatgtgtatatgtatctctacatggctctctgattattcatgtatcaaaagcaagattgataaaatttgtgaaaagctttgttttgagattttttttaagatcgaatcgaatcaggactaacccatttccagtaatgtcgtttcacagttacagcattcccagcggcgagtgtttcaaccgaatctttcgtcgagtctcctccctcgtactctttttcctccgtacagaaatcttgctccggtaatccctccaccgttgcattcacagagtgaagagcgtaacgcgccggtaatcctggatacgatagcgagttcctttcttcaactcttctgttataagttccgggaagaatcttaattctctgtccaatgttatcaccatcgccattgaagatagatccgagctcttct

SEQ ID NO: 931 - DNA, 525 bp, Arabidopsis thaliana
tgggtccgggtcagaagaaaaagaagagagagtttcgggtcaagaaatgaatccgacccggatgttatacgggttaccagttggagatccgaatggtgcgagttttagttcgttgttggcgtcgaatatgcagatgggtgggcttgtttacgagtccgggtcgcgttggttaccaggtatggatttgggtttgggttcggtacggaggagtgatgacacgtggactgacttagctatgaacagaatggagaagaattgaagaggcgaagggtaatttggtcaatttgacatagatgtcttttttttagtcatctcatagtcaaacataacaacaaatgatgtcggtccatttagcgctgtagtcattttttttcactttgtttttcgtcattttccacccaaattggctttagtgagtgttatttagaaaaaaaaacatttccgcaaactctagcgagttttatatgatgataagtatttgatgaatatctatttcttttggaattatattaaaaaaaaaaaaaa

SEQ ID NO: 932 - DNA, 525 bp, Arabidopsis thaliana
ttttttttttttttttttttttttttttttttttttttttttgatttcattttacatttatagcaatggtttgatgatcttttcccaaatgtcacattgaagaagagaaacattaggtttttggaagagaaattgtatctacagaatcaaaaacatcatgccgttttctcacaaaccaagagcaccgagaggcgttttcccctgcccggcctcaaagtaaaagatcaacatggcaaccattgcgagcctcgagtgcttaatctctgccaatttcagcctctccagcttctcaaagtccggctcataaacaccgtcgcggtttttcccggcgagacccaacggatcgaagaatctcccaccggggtatccctgatcgccggtatagttcgcgaaattctcggcggtcttcgaccatggcgttgcccactcaaccgattgaaaatccgggttgaagaaatcgacccatcgtttgctctccacccaacccatgagaagcaattgggttccaagaagcgacccgaacga

SEQ ID NO: 933 - DNA, 525 bp, Arabidopsis thaliana
ccacgcgtccgaagatctcaaattttgacgctttatcaaatttcttacttcacccataaaaatctgagtttttagacttcaacaggacagatctttcttctctttccagatcctaaaatcttcatctcctacagatctgcagaaatggcggttacgtactgattcagatacgggagaagaaaaagaagaaagctttctgctttaacttttcccattactgtaatggcggatcctctaaacggcaagtccttctttatctgtttctcccttttattctccttcactctgcttttcatttcgccgttgtatgccaccgagtctccggttatcgaagatgtttctaccgatgttgctgtgtctgttagcgaaaccaatcgagaagctgttctattgcataatttagaggaactcgttaagaatctgacggaattagtcgctaatctagatgctaacttatctgcaactccattaaaggagaagaacgagatctcagttgatgatgacatcggagaagagaaagagaga

SEQ ID NO: 934 - DNA, 525 bp, Arabidopsis thaliana
ggttgagactgtgactcttggaccttctgttcgtgaaggagagcaagtttttggtgttgttcacatctttgcatctttcaatgacactttcattcatgtgactgatctctccggtagagaaactctcgtccgcatcaccggtggcatgaaggtgaaggctgaccgtgatgagtcctctccttatgctgctatgcttgcagctcaagatgttgctcaaagatgcaaggagcttggcatcactgccatgcacgtgaagctccgtgctactggaggaaacaaaaccaagactccaggtcctggtgctcagtctgctcttagagcccttgctcgttctggcatgaagattggtcgtattgaggatgtgactccgattcccacagacagtacacgccgaaagggtggacgaagaggaagaagactctgattgcacgatgaggctcatcatcgttgcaatgtgctcttgagactgtgggtattttcttgggtacacttcgaagttagttttgtctttctccaatttatctt

SEQ ID NO: 935 - DNA, 525 bp, Arabidopsis thaliana
cgaaatgtattatgtgggcatgtggcaaaaacagatacattttttgcaaaataattaaaggctgaccaaaataacgtaaataaaaaaactccaaggctacacacaagagtaattgtccacttacatatgaaacagcaactccaaggatacacacaagagtaattgtccacttacgtacaaactgatgttatgaattatggaaaagcaagcaatctccaaactctttcctcatactctcatgttcagaaagaaggaagttgtttggttaggtcatttgtacacaagtaatcagactggacgtagctggaaacaaagtatatggcctactatatcacataagaagaaactgtttggttgttttctatcttttggcaagaagaacacccagagatggaatccagttgggaatctaaatcataattaagcacctctattaacggtctgcaaatgctcataagcatccgattcatcttagggaacaaacaatgtaactgttgttgtttcaaaacaagactggagagttta

SEQ ID NO: 936 - DNA, 525 bp, Arabidopsis thaliana
ccacgcgtccggcaaagcatttattaagaaaaatagagaagcttaatacaaaggcggaaaaagaaatcataataacttggtcccgggcatccaccattatacccacaatgattggccatacgatcgctattcataatggaagggaacacttacccgtttatataatagatcttatggtaggacataaattaggagaattttcacctactataaattttcgaggacatgccaaaaatgataatagatctcgtcgttaattaaataaattaaaaaaaatgaatatagattttttttgagtgagaggtaaaccttatgataaagaagagaaaaaagaaatcatatacggaagtatatgctttagggcaatatatatctatgtctgcccataaagcacggagagtaattgatcaaatacgtggacgttcctatgaagaagcacttatgatattagaacttatgccttatcgaggatgttatcccatttttaaattggtttattctgctgcagcgaacgctagtcacaat

SEQ ID NO: 937 - DNA, 525 bp, Arabidopsis thaliana
  misc_feature (1)...(525): n = A,T,C or G
tgtgtaagcttgaaacttgactatctgggtctctcccattttctgttctcttttgtattctgagtgaaagttttgttttctgggggaaaaaattagggttcttagatggaggagatagaaggaacaaacagagcagctgttgagagttgtcatagagttcttaatcttttacatagatcacagcaacaagatcatgttggttttgaaaagaatttagtatctgaaactagagaagctgtgattaggttcaagagagttgggagtttgttaagcagtagtgttggtcatgctaggtttagaagagctaagaaacttcagagtcatgtctctcaaagtctcttacttgatccatgtcaacaaaggacaacagaagttccatcatcatcttctcagaaaacaccggtactccggtctggtttccaggaattgagcttgagacaaccttcagattcactcactntnnnnactcgctcttttagtttaaactcaaatgctaaagctcctctccttcagcttaatcagcag

SEQ ID NO: 938 - DNA, 525 bp, Arabidopsis thaliana
agtttgtcgttgcaaacccactctcagtgaggaccaaggttcgagttgtaaaggagacgacatttttagaggcttgcattgagaaccatacaaaagcaaacctctttatggaccaagttgattttgaacctgctaagcaatggagtgctgtaagattacagaatgaagactcaacagaagatcctccaaccagtggtctgagtggactgatacctaaaccgccagttataatccgatctggcgggggtatccacaactatctctacaagttaaacccatctgcagatgtttccgggcaaacaaaattccagggaagtaatatcctgggtaaatttcaaataacatggcgcacaaatttgggtgaacctggtcgcttacaaacacaacaaattctcggcgctccagtaagccgtaaagagattaatatgcgagttgtagaggttccagctgttatacacttaaatagaccctttcgggcatacttgaatctcacaaaccaaactgataggcaactgggacccttcg

SEQ ID NO: 939 - DNA, 524 bp, Arabidopsis thaliana
  misc_feature (1)...(524): n = A,T,C or G
aggtgttgatttagcccattcgtagacttcctccgcgccgccgttagacgccgccncggaagtatcagcaaccgccgtggtgttcgtcgccttcaaagactcgtttctctcctctctctgagatctgaatttgagatgtttaaaaaaatgagtgctactacaagcaagacggatcagaaagcggcattagacattgcatcatggctattcaatgtggttacttccgttggaatcatcctcgttaacaaagctttaatggctacttatggctttagtttcgctactacattaaccggtttgcatttcggaacaacgacattgttgacaactttcttgacatggcttggttatatccaaccttctcagcttccttggcctgatcttttgaaattcgttttgttcgctaacttctctatcgttgggatgaacgtcagtctcatgtggaattctgttggcttctaccagattgcgaagctgagtatgatcccggtttcttgtcttctagaagttatgcttgacaatgt

SEQ ID NO: 940 - DNA, 524 bp, Arabidopsis thaliana
ccacgcgtccgtagtcattgtcctcaaggtgcaaggtctatatcgttcagctggtgcaataacgttctactaagtggtctatcgtcgtttaatagccagaatatgcacgtcacggttcatcattcttctaatgttcggattgaaaacgtaagaattagggctccaagtggaagccctaacaccgatggtatccacgtacagtcttcttctggagtcaccattagtggcggaaccattgcgaccggtgatgactgcattgcacttagtcaaggatctaggaacatttggatcgaacgtgtcaattgtggaccgggacatggaatcagcattgggagtcttggggattacgctaatgaggaaggtgtgcaaaatgtaaccgttacgagctctgttttcaccaagacgcagaacggagtaagaataaagacatgggctaggcctagcagagggtttgtgaataatgtggtatttcgaaatttgataatgaataatgttgaaaatccggtgataatcgatcaaaacta

SEQ ID NO: 941 - DNA, 524 bp, Arabidopsis thaliana
  misc_feature (1)...(524): n = A,T,C or G
aattgatgggtgcttgtatttcgttcttttcttcttcctctccttccaaaacaggtctccatagtcatgccacaacgaacaaccacagcaatggaacagagttctcgtcaaccaccggcgcgacaacaaacagcagcgtcggacaacagagccaattctccgatatttccactgggattataagtgattccggtaaactactggaatcgccaaatctcaaagtctataactttctggatctaaagacggcgacgannaatttcaaaccggattcgatgttgggtcaaggaggtttcgggaaagtatacagaggttgggtcgatgccacgactcttgctccttccagagtcggttctggtatgatcgttgccatcaagagattgaattctgagagtgttcaaggatttgcagagtggcgttcagaagttaacttcttgggaatgctttcgcaccgaaatctggtgaagttattgggatactgtcgtgaagacaaagagcttctccttgtctacgagttcatgccc

SEQ ID NO: 942 - DNA, 524 bp, Arabidopsis thaliana
  misc_feature (1)...(524): n = A,T,C or G
ccacgcgtccgaacagtttcagcaagaggtgtctatgcttgctaatttgaagcacccaaacattgtgaggttcattggtgcatgtcgcaagccaatggtgtggtgtatagtgactgaatacgccaaaggaggttcagtgaggcagtttttgactaggagacagaaccgagccgtccctttgaagttagctgttaaacaggctttggatgttgctaggggtatggcttatgtccatggacgcaacttcatacacagagatctcaagtcagataaccttctcatctcagcagataagtccatcaagattgcagattttggtgttgcaagaattgaagttcaaaccgaaggaatgacaccagaaactggaacttacagatggatggctccagagatgatacagcatagagcctacaatcaaaaagtggatgtgtatagtttcgggattgtgctgtgggagttaatcacannactcttaccgttccagaacatgacagctgtacaggcagcgtttgcggttgtaaaca

SEQ ID NO: 943 - DNA, 524 bp, Arabidopsis thaliana
aggctcaggagaattgaccttttgaatatttcatacggttaaaaaattcttctatatataaagttgctttgaatattttgtagtctctgtatgttcaaaaccgtttaacaataacaacaacaaaaagcttccttttttgttttttgagttttcgtcgatcgattggtttaaatcctgtcgtatcaatttgttctcgattctccgcgaccatgcaaatttagggtcttcgttttgtttgatgggcgcgaatatctcgggaggttcaccggagtttgaccggaacgatgacgtttactcgaggaaactcagattggtggatttacctgagaattgtgtagcgttgattatgacacggcttgatccacctgagatttgccggcttgctcgtctcaacaggatgttccgtcgcgcttcctcagctgatttcatttgggaatcaaagttgcctgcgaattatcgtgttattgcacacaaggtgttcgatgaaattactctgacgaaattaataaagaaagatctttatg

SEQ ID NO: 944 - DNA, 524 bp, Arabidopsis thaliana
aagcaccatacatagattaagacacttaagagaggctaaaaccattcctagttgcaacttttaggtagagacttcgaacataacaaggcctggttcatggagatggtggccaaatatgcggttccatgtctaaaactgcgttttccgcataaaaattatcgtcccaaccatgctcaaactcatcctcatagaactctcccattacaccatcttcaaaaaactcccaagccaagtaatcagacccatctgagaagtaatctgagcagcaatcctcccaatcatttatcatatcatagaatccgatcacgcgtggacctaacactttcatatccggaaacttctctttgaaaaacttgttatcaagttgcacgtcccaacagcctctaagttccaagaactcaagaaaaacacagcacgataagatcttgagtactccttctgtgctgactcggtggtaagctatctctaaccgcttcagcttcggcattgtattggcgatagcataagcttcatcgtcgtgagag

SEQ ID NO: 945 - DNA, 524 bp, Arabidopsis thaliana
  misc_feature (1)...(524): n = A,T,C or G
tctcaacacgggttcgaatcttcagcagctgcagcggttgcagtgatgaaagcgagatcaaccgcctttgcgaaacgtagcttgagcttcaaaccagctactcaagcagcaccacagtcgaatctctcggattggggatctccaaacgggaagctggaatggggaatgaaaggagaagagctgaataagatgagaagaagtgtttcctttggaatccatggaaacaacaacaataacgcagctagagactacagggacgagccagatgtgtcatgggttaactctttagttaaagacagtactgtggtgtctgagagaagctttggaatgaatgagagggttcggataatgtcgtgggctgagcaaatgtacagagagaaggagcagactgtggtgtaaacacacacaaagatggnnncttatatatattgcttttgggccatctctgcaaatttgattctttaatttttgtgactttctttagttgttactgttattagtagtatatggtttgttgtcactac

SEQ ID NO: 946 - DNA, 524 bp, Arabidopsis thaliana
  misc_feature (1)...(524): n = A,T,C or G
tttttttttttttttttttttttttttttttaatcaaactctctttttcccaaaagaagcatagcctntnnagttacaccacgattaatgggcattttgttacgtgtatcccaagcaatacaaataaaagttccatcaaaatgggagttttaggtctattagtgtaagcctttcatcgtttacatctcgacattgtcccagtcaaacgatttcccttctaaattgtaatccgggtgttgcattctgttcctcgccaatctgctcatcacggcaagcccttcgaccattttgtaaagagatggccaccaacgctctctagagatgtcactttggtttagagagtcttcaatctctttatcatgtttcccttcaaggacactgcgtagagtgacgacggcgtcctttgttttcttcaaaatactgttatcatcttcgatttcaaggctttggaggtcgttgtgagatgaagtgaggctcacagccaatgcaaattgagcagctgcagcccaacgagaagaagcttg

SEQ ID NO: 947 - DNA, 524 bp, Arabidopsis thaliana
agcgatgtcgatcaaaccggagaattctccgattccgttgattgggattaataatacgtgtgaaatcatggtgtctttgagttcatgaagaacggaggttaacctaatcgaagatttgatttgggactgcgaatgagagagaagacgttgaaggctcaaattggagatttctatgaatttgttgatttgagagaagaattgaggctcattcgtaacggagggaaggtgacggtgacggcgatggtgaatttatagttgtacacggagctggaactcatcaaggacaaagaaggcaaagctactcatctacttaagttctgctccaaagctgaaatacggagattcagatcctttgttcccatgaatcaactacagacgctttaataatctgagggaatcttccgtgccaatatggagagatcatcatcatcatcatcatcatcatcatcaacatcatcatcatcatcattatcatcatcatcatcatcgtcatcgtcatcgtcatcatcatcgtcatgtgatca

SEQ ID NO: 948 - DNA, 524 bp, Arabidopsis thaliana
ccacgcgtccgccaccttcttcgacatcatcatcagttgcagacaacaatagacctccatcaagaacttcaagaaaaggccctggtcaattacagctttaacctacccggtaatcataaataataaataatattccatccccgacaatcttcatcttctttgtgtggacaccaccgatcccttttgtctcctgtaaaattgtatatctctctttttagtaactcttcaagtttcgacggaacttgtggaaaagctacggtcgtgtccatcatctctttctctctgtcgggttttttttatttacgagagattcttcttcagtccctcagtctacctttatattgtttttttgggggtttctcgtttctttgaatttgtttcattgtttggagctttttatatttttaccttatgtggagatgtaagaaaaagaagtgatcatgtggttttgtgttgtttttttataactggaaaaccacatgagtttgtagaggtcacttattggatattttatgtcaaaaaac

SEQ ID NO: 949 - DNA, 524 bp, Arabidopsis thaliana
tcgagcggccgcccgggcaggtaccatctctatcaccaaccgccgcggctgaatctagcggtggtgggacgatgatagctactgttttcatggcccttctcctcccctgcgtcggcatgtgcatcgtcttcctaatctatctattcctcttgtggtgctccacacggcgtcgtatcgaacgccttcgatttgctgaaccggttaaaccggtcacaggtaaaggcctttcggtgttggagctcgagaaaatccctaaactcaccggaagagagctagccgtaatagctagatcaacggaatgtgctgtttgccttgaagatatagagagtggtcaatcgactcgtctagttcccggttgcaaccatgggtttcaccaattatgtgctgatacgtggctatctaaccacacggtttgtccagtttgccgcgccgagctggctccgaacctacctcaatgtaatgaaaatcaaagtccatgttagaaacagaattttcaaaaacattctttccttcttttttactcg

SEQ ID NO: 950 - DNA, 524 bp, Arabidopsis thaliana
tcataggaaaagatctggctttacttttagattatctcagatccagccttttacccaattgaagtgtgcaaaagtaagtacccccccacctctgttcctcacggtttttctgcaaaggacccaccctccttgaacttcagcgtccatcacaatgtccccatcatcatcaaacctgtacaagccagtggcgatcctaacattgtagaagttgatagcatttttgcaagtggagggagcacttgtgtttctccacgtattgctgtcttgattaaagcggttgtcaactctgtaaagtccctctacttcaataggtatggtaaatgagtttgattctgggaataggttgtggttgttataaagaatgctccactcagcagcgttgagccagcgctgtgttgatgtttgaagcacagctgctacatctgtcaaaaatagcaaccaaacatatgagatttatatatatattataagcaactgttttattctgaaatttttaaatcttgccttaaaaaaaaaaaaaaaaa

SEQ ID NO: 951 - DNA, 524 bp, Arabidopsis thaliana
gcggccgccgaattgcctcgattgagaataaccacaagcctgttgactatgcaaagaagggcaacaaggtggcaataaagattgttggttcgaatgctgaagaacagaagatgtttggaaggcactttgacatggaagatgagctagtgagtcacatatcgaggagatctatcgacatactaaaatctaactaccgggatgaattatcgttggaagaatggaagctagtagtgaaactgaagaacatcttcaagatacagtaggagattcaaatgtctactttggagcttgaaacactctcacatgccttgttatgccgtgtctgcgtcgatgcagaacaaatagattcgtcttcctgcttctagcggagaagccttcacagaagatttgaaagagagacaagagagagtttttgtttttggtttattttctttctttttttggtctttctccctgaaaagtgctgaataattggttcatgaaccttcatgctggcaaattgcaggggaaagaagagccttggg

SEQ ID NO: 952 - DNA, 524 bp, Arabidopsis thaliana
tcgccaccgcgaatgtcgttggaattccgaaattgagacgaccaatcggagcgatccaccgtcaattcagcactgcatcgtcttcctcgttctcggttaaaccaatcggaggaatcggagagggagcgaatctgatctccggtcgtcagcttcgtccaattcttcttctcgattcgtcggcgatcaacggaggagagaaaagagagattctcaaaccggttaaagccgccgctgctgaaggtggagataccgctggggaagctaaagttggattcctcgccaagtatccatggctagtcactggattcttcttcttcatgtggtacttcttaaatgtgattttcaacatccttaacaagaagatctataattacttcccttatccctattttgtatcggtgatacacttgttcgtgggagttgtttactgcttgatcagctggtccgtgggtcttcctaaacgtgccccgattgactcgaacctcctcaaggtattgataccagtcgcagtctgtcacgcctta

SEQ ID NO: 953 - DNA, 524 bp, Arabidopsis thaliana
tcgaggggccgcccgggcaggtcaaaggcagttcttctcccgtggcttatcccatcgccgagacacgtatcgctgttcccagtggttcaattgccggcgttggagaccgccgggtggtgtgtaagaaagaggagggcagaagacgtagcagtctccgtcgccttcaatccttctggcaatttcgacatctctgccttcgagaatgaccaagattcagataaagtggaacctccgatgcctccaacgaccggccggtacgaagtagtgatcgacaacgactcaattgggcggcttgacctatccccgtttcagagagccatcggcataacctcgcctgatgattttggtgtagctgaaccaaaacggtatttggatcgaaccatcggattcaccatcaattacaagagagaagaccccggggatccgcgggagctgtcagagtacccggacgtaagactatggttcgtgaggctcgacgcgatgtacccttggctgcctctgctgctggactggcgagctggaga

SEQ ID NO: 954 - DNA, 524 bp, Arabidopsis thaliana
  misc_feature (1)...(524): n = A,T,C or G
ctttttttttttttttttagaaacaatggtttttattttattagcaattcaattattacatgaaggctttatattctacattctttagaaggaaacaaaaatagttaaatccaatatctttgattttgttcatttttatggaatagaaaccaaagcttttttattcacagaataacaccaccaagttttttcttcatcatgcaacaactacttgagcagctgcaagccttgcaattggaannctgaaaggagaacaagagacatagtcaagtcctgcttcagcaaagaatcccacagaagatggatctcctccatgttctccacatatcccaaccttgaggctaggcctagctgctcgtcctttttctgtcgccatcttgatcaattgccctacaccttgctgatcaagaacctcaaaagggtcgtgctgtaagattcctttggcgaggtaaatcggtagaaacttgccgacatcgtctctactgtatccaaacgtcatctgcgtcaagtcgtttgtcccgaac

SEQ ID NO: 955 - DNA, 524 bp, Arabidopsis thaliana
  misc_feature (1)...(524): n = A,T,C or G
tggctacgtcatgtgtctttctcatattccggcaatcctcaagaggaaatctagaatcctccatacattnnnnnnnnccttactagggttttgtgtgtgttggcaggtggaagctgacgaagaacaacatcatatatcattcaccaagtaagtaatgtaaagtaaagtagcagctctatttattttctttcctatgattgagatgaaaaattcgattgttgttgtatgagacagtggtacgagaaaaagatatctgctgggaatacgcagagaaactagatggtaacaaggttaaatgcaagttttgctctagagttcttaatggcggcattagtagattgaagcatcatctctctcgccttcccagtaaaggggttaatccatgtgccaaggttagggacgatgttactgatagagttcgttccattttatctgccaaggatgatccccccattaccaacaagtacaagcctccaccacctttatctcctccgtttgatgctcctgcgtccaaactagtcttt

SEQ ID NO: 956 - DNA, 524 bp, Arabidopsis thaliana
tatatatcttagaaaacattataacaacaatgatgagtccaaatccatctttatgatcttacaactacaaaacaatcatcacacttcaccccaacaaaataattcttctgacttagaaaaacaaaacacaaacaccaatcacaaaaataaacacagctaagctctaacttacagttttgagaagagtttaagtcacttttaagctcgttgtgaccttctttgtcctcttgccacgaccattttcgacaaaacctcttcaagatactcacaacggtctctatggtgttcgatccatatacataactgtcttatcgcttctctcttctcttctcctaatcccaacaatgtctccttcaacttctccttctctttctcctcttctcttacttgaccttcaagcttcttctccacctcttccttctccttcgccatctcgtctttctccttcttcatctctaccacacacttcttcgccgtcaagagcatcttcgtcgcttcaaccactgttttctcgtagcttttgt

SEQ ID NO: 957 - DNA, 524 bp, Arabidopsis thaliana
  misc_feature (1)...(524): n = A,T,C or G
tgacgtcgcatgcacgcgtacgtaagcttggatcctctagagcggccgccctttttttttttttttttttttacgttaacaaagcttgaataattttacttttcccataatcaaaagtctaatactgtatgtatgttgtgtttttacacgaatgtaaaatattgccaattactacaacttcaaaacaactacaaaattatttgatttacacgcacatagattgatatatggttttctgatgattcattcaatgttgattcgaacaaccttcttagctccagttgcagatcggctcgaaccagtctgactttggtctgtttggcnacgaatttggtcaagagatggaagtacccaccctccaaaactattatcagagccagtgaattcatgcttgccaagagatgaattgcctttccatgcttcttcaaagccacttaattcatcttcatcgaggttgtgaagagtctgtgtcgactctacaccaccacttgagttgagcttcctagtaactgaatgacccttat

SEQ ID NO: 958 - DNA, 524 bp, Arabidopsis thaliana
ccacgcgtccgattagcttatagccattagttttgtctcttcttcttcttctcgttggtcggcttcttcgtcttactaattccatgattcttcttcttccttctgcttcactttctcgatgatcctctgcaccagccgcgatcatgacgttgaatcctcctccgtcgcagcaaacgtctcactcgccgcgtcggattcccaatcgccgcgttctcatcgtcggaaattattgccacgacgttttaatccaaaacggatccgtcgtagctgaaactctcggcggcgccgcctctttcatatctaatgtcttagattcttcctctgtctcctgcgatttggtctccaaagtaggacacgacttcagatacgaggtcacccactctccgatcgtggctccggagaaggaaacaacagttttcgaggcgtatttcgatctgggaatcgatgggatcggtcatgctgatcgggtgttgaaaagagtctctgcatgtgatccgattcttccttcggatatacccgattcg

SEQ ID NO: 959 - DNA, 524 bp, Arabidopsis thaliana
cgccggatctgatagtgcatatccatgaagtagaagacgaagaaacttactttctgatcttagaacggagtatatgtacagaagattcgcgtccctcaatttttgatctcaagggtcgggtttacctttttttccttcttatttttggtggctttgcgttttctcattcgacgatttctggatttggggatttcaaaaccatgaggaagaagctcgatactcggttcccagctgctcgtattaaaaagattatgcaagctgatgaggatgttggcaagatagctttggcagtgcctgtcttagtctcaaaatctttggagttgttcttgcaagacctttgtgatcgtacatatgaaattacccttgaaagaggtgccaagactgtgagctcattgcacctaaaacattgtgtggaaagatataacgtgtttgattttctgagggaagttgtgagtaaggtgcctgactatggccattcccaagggcaaggacatggtgatgttaccatggatgatcgcagcatc

SEQ ID NO: 960 - DNA, 523 bp, Arabidopsis thaliana
aaccgtacaaacccacacgttcaatcccatccacgactgcctcgagctgctcgacgacacacttgacatgttatctcgcatccatgcggataatgatgaagaagatgtccatacatggctaagcgcagcactcacgaaccaagacacttgtgagcagagccttcaagaaaaatccgagtcatacaaacacggacttgcgatggatttcgtcgcaagaaacctaaccggtttgttgactagctcgcttgacttgttcgtatccgtcaagtcaaaacaccggaaactcttatcggaacaagaatattttccgacgttcgttccttcgtcagagcaagggaggcttctagaagctccggtggaggagctggaggttgatgcggtggtggctgcagacggaagtgggacacacaaaaccataagagaagccttgttgtctacgtcattagcgagtagtgggggcaggaccaaaatatacctaaaagtcgggacatatcatgagaacatcaacattccgacgaagcag

SEQ ID NO: 961 - DNA, 523 bp, Arabidopsis thaliana
attgcttccatctgcaatattcaagcgagctcctgatcagagctttgagttgacaaatgcagcaatcgatttcctgaaaggaatgtatatgttgtttgatgacgaccaggataacaatctgagacctcaagagatcgaggatcttttttcaactgcacctgaaagtccatggaaggaagctccttatgaagatgctgcggaaaaaactgcccttggaggactatcatttgacgctttcctgtcaatgtggtcactgatgacactattagaaccggctcggagtgtggagaatttgatttacattggattcccgggtgatccatcgactgccattcgtgttactaggagaagacgtttagatcgcaaaaagcagcaatgtgaacgaaaagttttccagtgctttgtttttggacctaataatgctggaaaatctgcattgctgaattgctttcttggaaggtcatatactgataaccaggaatcaactactgatgagcgttatgcagtaaatatggtcgatgaa

SEQ ID NO: 962 - DNA, 523 bp, Arabidopsis thaliana
atggccagttccggtgattatgatgaaattataaagtctatatctgatgccccaccaacacattacatggtcaagatagagtctttctcactccttacaaagcatgctattgagagatatgaaactgagagctttgaagctggtggctacaaatggaaactggttctgtacccaaatggaaacaagagcaagaatacgaaagaccatgtttctgtttacttgtctcttgcggactctagttcattaagtccagggtgggaggtttatgcagttttccgtctgtatttactggatcaaaacaaagataactatttgattctacaaggaaacgagagacggtttcattcggtgaagcgcgaatggggatttgataaattcatcccaaccggtaccttctctgatgcgtcaaacggttaccttatggaagacacatgtatgtttggagctgatgtgtttgtttctaaggagagaagaagtgggagaggagaatgtttatcaatgattaaagatgctactagctcta

SEQ ID NO: 963 - DNA, 523 bp, Arabidopsis thaliana
ctttttttttttttttttttttttttatataatgtacgatcttttcctcaaatttttgatacaagtgtaatgatacccttaatgggtatcttcttaatgctacataagttagtcaactgcattacagaccatgtttttagttcaatacaaagtggtacctcgcatctacatggctctcaacatcccaaaggaacgacccgaaagtaactgcctccaagacgagcctcttcattccaccgaagctgatctttatctgttcgtccttcgatgaatcgactgtgccctccggtgttattacaatctcaggcttaccaaacaatgcctctgtgtgcttctcgatgattccaactgcttctcttgatcttatagtggcgtatctctgcagcgtctccgcatcaaatgacatcacatatgaccttaatcgggatggtttaatctcgctgccgaagcccttagcactaactccgcccgcaaatgcaccaacctctgggtgagacgatacagccgcctgatatgttgccgt

SEQ ID NO: 964 - DNA, 523 bp, Arabidopsis thaliana
ccacgcgtccgcattctctcacctaacaactccacacaagattcttcgcatggaaagttgttcttcgacttctcttctctaactcgctatcttttaactcacccagctccactgagtcgaaaatttcaaacctttactcgtttccttcatggctaataacaacaacatcccacatgatagcatctccgatccatctcctaccgacgatttcttcgagcagatcctcgggctttccaacttctccggttcttcaggttctggtctctctggaatcggcggcgtgggtccacctccgatgatgcttcagcttggttcaggcaacgaagggaatcataatcatatgggtgccattggaggaggtggacctgtagggtttcataatcagatgtttccgttgggattaagtctcgatcaagggaaaggacatggctttcttaaacctgatgaaactggtaaacgtttccaagacgatgttcttgataatcgatgttcctctatgaaacctattttccatgggcagcca

SEQ ID NO: 965 - DNA, 523 bp, Arabidopsis thaliana
cggccgctgaagataagctgaaagaaagaaggaaagaacaactcatatgaaaaaaggtcaaagagtaaaatgataaagactataaaggagtctcctctcctccaaaggaaaatatttaaatgacctcaatcaaaaatgactcacctaaaccccctcaaagaatattacagacgaaagctggtttattatccactcaaacctataaaacaaaacaaaacaaggaaacattccgacagaattccgcggtcacagtcttctagtaagcgaataccaccatggcagattgcgctactatgagatttcaattacttatatggatacttgttttcccaaaggtcttagtagccgcccatcggtggcattccatatggaggcattggaggcattcctgacattcctggcattccacccatttgtggtggtggaccatacccgccacctcccattcctggcatcggtggtgcgggtagagccagtggtaataattgggcgtacatgttctgttgtgacatgacatccttct

SEQ ID NO: 966 - DNA, 523 bp, Arabidopsis thaliana
tgtatcgttactgaaatatagagatacaaaacattaacattcattattcattttgctacaacatggttaatcggcgatggcccaattcatatcattctcaaagatccaatggcatacttcgatctgacctggccgggacccaagcaacatgaaggctccatggttcgcaccccaagctgatgtgtccatgtgacatatagcaataccatggttgatcttggctttactcttgggatccaaaagatctgactcgtacacccgaactttaggcacagagtgacagtagtagagtaagtaagggtacaaactttggtgacacgacactgattttgtcactcttccaccgttgattccattgactttaccgatcatgactttctcctttgatccggctacactctctgtcgtccggagtaccacacttcgaccaagcacagatgtcgcgaaatcgatcatatcctccgctgatccgacacatcgtttagtctcgctgactgtcggcggtctctcacattcccttacc

SEQ ID NO: 967 - DNA, 523 bp, Arabidopsis thaliana
tttttttttttttttttttttttttttttaataatcaagaagcgtcacattaagagtacaagagcttaaccagaaaagaagaaaaataaacaaggcagagtctagtaagactaggactaaccaaacaaatggtttttcattaaatcagaagtcgagcttaaccggatatcggtcgatgcagtgttcccacggactactaaccgaaggcttgacattgtttagagccacccaaactgcactgttacacttaaacccacttccaaaagcaatctgccaaacccggtttcctttcttcatcctacctttagcctctatgtaagccagttcataccaaatcgagctcgaagaagtgtttccaaatctgtgcagtgtcattctggatgcctcgacatgagtctgcgaaagctgcagattcttctcaagctcatcaatcacagctctaccaccagcatggatacagaaatgatcaaacgcaagcttgaaatccggaatatacggcttcagcttcgagttaaacagtttc

SEQ ID NO: 968 - DNA, 523 bp, Arabidopsis thaliana
tcattgtcaatttcgacagtgtcttccttaatacctgggcacaattgaaagatgtggtgctagaaggaggagatgcgtttgggcgtgcacatggtggcatgaaactctttgactatatgggtacagatgagagattcagcaagctttttaaccagactggattcacaatcgcggtggtgaagaaggctcttgaagtttaccaaggcttcaaaggtgtgaatgtgttggttgatgtgggaggtggagttggtaacactcttggtgttgttacttctaaatatcccaatattaagggtatcaactttgatctaacttgtgccttggcacaagcacccacttatcccggtgtggagcatgttgccggagatatgtttgtggatgtcccaaccggaaatgctatgatcttgaaacgtatacttcatgattggaccgacgaagattgtgtcaagattcttaagaattgttggaaatcactaccacaaaacggtaaagtggttgttatagaattagtcactcctgatga

SEQ ID NO: 969 - DNA, 523 bp, Arabidopsis thaliana
ataaacaccaactcataacaaaaaacaaagaaccagaagtctaggcacaaaatgcccacaaccatcatacataaaccaagaagcttcaaatgcaactacaaagagagtttgcttatttaggcttttaattatacatacaaaccaccaagtcaccatattgttcactgaaggacaaggcactcggcggccgtcccatttgtgatcggacctccatgggttctgttgcttttctggttaacattgccactagagttttgctgatgaactatggttccttcaagatcctcctcttggttactacaacctatggcttcaaaggcgagagcagtaacctccttaaacctttcctccgacagagaagcttccgcaaggagcctccacgcgttatcctctgaagcaccttcgtaatcctctttcctcttcagtaccatgtgaccacttatctcccacacggctgggttcacttgtgtttccaatacctccgggctcacttcacctagagcctgtttctctgcgtaacact

SEQ ID NO: 970 - DNA, 523 bp, Arabidopsis thaliana
tttttttttttcttggaaataagaagatgtttctaaatcttagggacatgaagaaacagaacatccatacacatttgttgcaacttgcaagcacactaaacctacacaattcgtttcctctgtacaattactttatacaacttaaggaaactgctcacactcttaatatgctaaaatgcatcacaggaagatgaagatgaattgctctgagttctttgaagctcttcatgcacatcacttctcttccttttccttcctgaattcgctggagcttcatatttcccggcgtcaagagggaagttgagcacggcttttcttccccggagcttgaaagctgcacagtcataagctcttgcagcatcaacatcactctcaaatgttcctagccagattcttgatcctttctttgctggatctcgaatctctgctgcaaatttcccccacggccttcgcctcactcctcggtaatgtctagcatctacttcttcttcgaacctctctgcctttttcacactctgatcag

SEQ ID NO: 971 - DNA, 523 bp, Arabidopsis thaliana
ggctaaaggtgtggaagcagagtttgagcctcatcctcggattgttactcctacgcaaatgatccatcgagcgactggtattcctcttgagaacattctctaccttgggggacctaatattgcttccgaggtatacaataaagagtacgccaatgcacggatttgcgggtctgaaaaatggaggaagcctttgggaaagtttctaaggcagtctcatttcatagtctgggataatagtgacctcattactcatgaagtaatgggtggcttgaagaatgtttatgccattggtgcaggaatggtggctacactgactaaggaaagtgctaccagcaaatcagtgtactttgcgcattgtacttcagagatgatttttattactcatttattggccaaggagccagagaaactcgctgggcctttgcttgcggatacctatgtaacattactgaaaggtcgtaatgcgtggtacggccagaaacttgcaaaaggagaacttagccttgaaatgggtgacagcatc

SEQ ID NO: 972 - DNA, 523 bp, Arabidopsis thaliana
tttttttttttcattggggaaccaaatccttattgaaatgtgcgttcgcatgattcaaaaaggccataaaatccatttccaaacaaatgggaataaaatactgtgaacaaaaaccattccattgctaagtttcagaaaaggaaaagctgatttcgaaactcagagaaaataaaagagtatatagaatgatcttctttgttattgaacatgtttcaaagctgaagcattcactatagtcccaaatctatatgccttgtcagcttctacattttgcttcagtgaatcaccttctgtgttgctggacgaacttggagttcttagcatcttcctcagtgagtccggcggttagcttggtgatgagaacgccggtgacggcgaaaccggtgaggaatggccagcaacgtttccattctctcttgaagaacactggccatggatcgaacaacctcattttctctctctctctctctgcacagacaaacgattatctttcccttaagttttgttgttgttgttgtctggt

SEQ ID NO: 973 - DNA, 523 bp, Arabidopsis thaliana
  misc_feature (1)...(523): n = A,T,C or G
ttttttttttttttttttagcttcgaaatgtacactatcgtattatatcatggcttacatatgaagtaccagttttcattgtgtaccgagagagtttgatagattagtagacaaaaaaggtctaaacccaaatgtcttagattttgaaatggtgtaacttaggagcatcgagcgtttttgagctgaagatggttgaaaattcggtgagggtgcagtctctatacttagcagggttttctgcagacaggagatctttgattggcccatatactcgagaatacgccctcatgaacgtgctgaaaacaattgccacggaagtccgcggttcagaagatccattggctatcaccctatgctccgcgcttatgaacttatcattggttannngctgaagaaaatctccaatgttaatgactagagccccagggacaggagnnncatcaatccaatactgttcatggaaaacttgaagncctccaacattgtcttgaagaagaacggtgagaaaggaaatatcggtgtg

SEQ ID NO: 974 - DNA, 523 bp, Arabidopsis thaliana
tctagagcggccgcccttttttttttttttttttttaatcttaaactcttaaccttacatcaaagtaacttttattacattgcatacaagaaaagaacaaaccagcattattaggtttgagattaaacctgttcccacacatatacatagagatatgaactctacaatttcaaaccagagccttgaagtttctcctcaacaatcatgtcgattttgttttccatttcaggagtcatataactcttccaatcaccaacttcccctttacggaaaaaactcttgaaacttactccttccgacaagcttcctgttttgttgatctccaaaccgctaaggtttcttagagaacaaagttccaagatcttgtctacacctccactatcttcttcttcctttgtgaatggacaatctaagaactctgcaagtctcttgatttgcacacgaggctccgtcttcaactcctcgtacctcaagaaaagcacatgcttaggatcttccaagcttcccggacgcgtgggtcgac

SEQ ID NO: 975 - DNA, 523 bp, Arabidopsis thaliana
  misc_feature (1)...(523): n = A,T,C or G
ttttttttttttttttggcccaaatgtttatttttcataaaagcgtgcaatcaaagatatatagagcaagaaaacatgaatcaaaacactacaaattgtcgttaacaggaagaaaaagcacacgtttattagatgtagacgtaaaagcaaacaaataatcgagacatgatcctctcgatgcatcaaataatcgctgaacgaagaagactctccacagatgtttaaccaatataaanaaaactccagacttgagtagttcccataaatgaagtggcgagacacagagaacaattgtagacgtcgataccaaacaaacccaatttgaccaaacctcttaagaaactttaaaactcaaaaccagacacaataaaatcaaagaagagtcggacatgaagtaacggacatagtgacaatacaacccgggaatgaatannnagcaacgctctggataaatatgtctatgtaaggtcatcctcctctagctccttggccttgagcttctccttcaccctcaacaacatgg

SEQ ID NO: 976 - DNA, 523 bp, Arabidopsis thaliana
cctctagagcggccgccctttttttttttttttttttttttttttgatcgcaaccataagtattatataactcttttacccaccgagccttggtgacaaacatgcatatacataatacattaatggtatgcacatatgtgtatattcattagttgtacttattgtatacaatattttatatagagagactttgatggtgcacattcttatctaaatggtgtcttcatgagactcgtcatcaagagggaaacacgtgtcatcaccgccggtattccacaagaaattggcgtaattagcggcgtagtaagagttggtcggatcggcatcaattgcttctaagaaagtctcctcagccgcccaaagatcgtcccgtgctctccataagaacgtcgcatatttgctaaacgcctctgcatctttcggttccactcctaccgctctcttgaaatactcttccgctctgtcatggtcattagagacgaggtaaaggaactgagcatagttagcgagtagtagaggatta

SEQ ID NO: 977 - DNA, 523 bp, Arabidopsis thaliana
ccacgcgtccgattttcattaaaatctgttttaatgcttgcagatcaattgatatgtagagttgagtatatgcattcgcggggttttcttcaccgcgatattaaaccagacaactttttgatgggtcttgggcgcagagcaaaccaggtgtatatcattgattatggccttgctaaaaaatacaaggatcttcagacacaaaagcatataccatacagggaaaacaagaatcttacaggaactgctcggtatgcaagtgtgaacacacaccttgggattgagcaaagtagaagagatgatctggagtcacttggttatgtgttgatgtattttctacgaggaagtcttccgtggcaaggtttaaaagctggtacgaagaagcagaaatatgacaagattagtgaaaagaagatgcttacttctgtagagactctttgcaagtcgtatccatcagagttcacatcgtacttccattactgtcgttcattgagatttgaggacaaaccggattattcatatctga

SEQ ID NO: 978 - DNA, 523 bp, Arabidopsis thaliana
cggccgctcagcaaggaagtgagaacgagaaggagagatctgtgtttcattagagatgagcaagctcagattcttccaaagtctcctaatttcgactgtgatctgctttttcctcccgtcgatcaacgctagaggcggccactccgaccatatccacccaggtgatgggaattatagttttcatggtattgtgaggcacttatttgctcaagaagagcctacaccgagtttggaattaactcgaggatatatgactaatgatgatcttgagaaagcaatgaaggatttcaccaagagatgtagtaagatttcgagattatacaggtaatcaccatcatcgttggatcaatcagtagttgtattcatcctagattcagtattcttggtttctatattagggtcttatggtgttgttgattttgttctttatttctctctttgagggttttctggaacgtgctttcagcatcggaaagagtgtcaatggatttcctttgtgggtcatagagatttcagacaggcc

SEQ ID NO: 979 - DNA, 523 bp, Arabidopsis thaliana
gcagtttggagttcttgtctggataacaatgcattacgtgctgcatctgcttctgccgatttttcagccaaactttgggatgcgttaacaggggatgtgctgcattcttttgagcacaagcatattgtccgagcatgcgccttctcagaggatacaaaatcgttgctcacaggagggtttgagaaaattcttcgtgtttttgacatgaatcggttggatgcacctcctacagaagttgataaatctcctggttctatcagaaccctcacatggcttcacagtgatcaaacaatattaagttcatgtactgatattggcggtgtaaggttatgggatgtgaggagtgggaaaattgtgcaaacgttagaaactaagtctcctgtcaccagtgctgaagtgagccaagatggacggtatataacaactgctgatgggtcaactgttaaattctgggacgctaaccattttggactagtgaagagttacgacatgccctgcaatattgaatctgcatcgttggagc

SEQ ID NO: 980 - DNA, 523 bp, Arabidopsis thaliana
  misc_feature (1)...(523): n = A,T,C or G
catcgcgcgagcttgaaccaaaaaaaccatgaacagtgagaaggaagacgagccattggaagagatcggcgattcgaataatgttctcgatctcactagctatcagctccacagtctcgatacgnncgagttaccgccgaacctgattgagctggaccttacggcgaaccgtttgtcgggattggactcgaggatcgctcagctctccacgcttaagaagctttctctccgccaaaacctaattgatgattccgccgtcgaaccgttgtctcactgggacgccttgtccgatctcgaggagttagttctcagagataacaagctagcgaaagtaccagatgtcagcatattcacgaagcttttggtttacgacatatctttcaatgaaatcacttctttggaaggaatatccaaggcctctagcacactgaaggaactctatgtgtctaaaaatgaagttaanaagattatggagattgaacacttacacaacttgcagattcttgaactggggtctaataga

SEQ ID NO: 981 - DNA, 523 bp, Arabidopsis thaliana
  misc_feature (1)...(523): n = A,T,C or G
ccacgcgtccgcgggaaagtatcacccggtcaccggaaaattgattatttccgatgccaataggtgaccgtcagaatccgagtgtggagaagaagaagaacctcttcaggctatgtccgttttggcagaggagcagcaccacttcttcatcttcaacacagaatccaagccaaaactaccgtagccgccatggacatcggaatacagatatttccgccgtctctaagcctnnnntgactatgtcttccgtcgccagatcacttcttccagctcgccgtcgtctccgactagatccttccagttatctctatttcccttatgaacctggtaaacaagttcgcagcgcaataaagcttaagaacactagcaaatctcatactgcatttaagttccaaacaacggcacctaagagttgttatatgcgtcctcccggaggtgttttggctccaggagagagtgttttcgctactgtgttcaagtttgtggaacatccagagaacaatgaaaagcagccgttgaacca

SEQ ID NO: 982 - DNA, 522 bp, Arabidopsis thaliana
gctgcattttcgaagattattcatagaaatgcttatgggtaacaaaatccgttaaaatttatcgtaaaaaagttccacacaaacgatcaacacacaacaaaaaaactaactcagacgagcaaagaagatacattctttacctcaaagaagtcctgaagagcggtcattttaatggcacttgacttcaagctcttgattccctcagcagtggccaatgcaccagcaacagtggttataacaggtaccttgtatgctagagccatttgtctgagctgtctcccatctttctgatcaagagcatcacccgagcttgtgatcaacatcaaatggatctgaccattcgccaccatatcagcagcatgtggtcttccttcatgcaacttcaacactctctccactggaatgcctttcagttccaggaaatgagctgttcccgaggtggcaactattttgaacccaagctcgaggaaggacaccgcgattttctccaggtgcggtttggtcatatcgtttaagctgagg

SEQ ID NO: 983 - DNA, 522 bp, Arabidopsis thaliana
ttctgggttcatgaaaactagtcaagtagagcgattacatataatacgcacaaacaaacaagaagagaagaagaaagctccctgtacaagaaatacaaagctccacgagaagaagaaaccaaaacaaaagacttctttttctgggaaactgttaaaaacccatcatcacaatgaaaaccctcagattctctgtttcttccttcttcttcaacctattcgtcatcttcatcaagttgaacaatctgagcccgtctctgagcagctttccttctgatgaagaagccccatctcatggctgctttgatctttagccatcctacaacagccttgcccgagtttgaacggtcttcttcgtaatcagccattgacgtctgaccaaaagaatggaacccaaaactatcttctcccatgttcaatggagtttgctggtcaccaccattcatgctaaacagtctcaacagttgctgcatatcgtcgttctcgagcatttcgttacttctagccctaatctcttcctctgat

SEQ ID NO: 984 - DNA, 522 bp, Arabidopsis thaliana
  misc_feature (1)...(522): n = A,T,C or G
gatgatcccgagcctgtttcaaaatgcacctcatgagccacagccacggaaatggtgagacctaattcaccggctacctcgagaactttcttctgagccccagagggatcaattgcacccatgttagtgattatacaagtgcctctctccacagccaaaggtagcaacaactgcatccacnctgaaacacgagggtcgtagccgagaccgccagatgccatagaaagccatcgatcagccaaagttcgttcggctaagcactcaaggacaagatagttaagctcttcaactctctgaagcagtttgagagccgccagtggcctatcgccgccgaatccagcaccacatccgacgtaaaccgtctcccttcgcctcttcggattctctctcaagtttatcacacaatcgcagagaatctctttaacgtctgggttagccatgagagtaagaatcccacaggaagaggatcatgcaatggatcacggactgcttttgaatatttgacgacgtcgatcacaggat

SEQ ID NO: 985 - DNA, 522 bp, Arabidopsis thaliana
ccaatcaaaggagttcgagtttggctcgggactttcaacacagctgaagaagctgcaagagcttatgatcttgaagctaagagaatccgtggagccaaagctaagctcaatttccctaacgaatcctctggaaagaggaaagccaaggctaagactgtgcaacaggtagaggagaatcatgaggctgatcttgatgtggcggtggtaagctcagcgcctagtagtagctatcttgatttcttgtgggaggagaataatccggacacgcttctgattgatacacaatggttcgaagatatcatcatgggcgatgcgaataagaaacatgaacctaatgatagtgaagaagccaacaacgttgatgcttctctgctttctgaagagcttcttgcttttgagaaccagaccgaatatttctcgcagatgccttttacggagggaaactgtgattcctcaacgtctctgagtagtctctttgatggaggcaatgacatgggtctatggtcctgaacggttctattg

SEQ ID NO: 986 - DNA, 522 bp, Arabidopsis thaliana
taaaactccagaacttgttccagaaagcgctgaaccgatgagatcaggagtcccaaagaccgtaaaagcaactcagaaattgttgagcttatggaacagaatcaaagactacctagctgatccaagaatggggcctacattgcttctaggagcgttgttatctgcaggcaatgtttggtggatgagaagccgatcatcaacacaacaacctgctcagacaaatcagccatcaccaaatcaaccagccgataacgtggaggagaagaagaagaaagagagaaagagagaacaacgaaggaggaatgcaaaggaagaagaggttcctgcttcgatcactgataacgaacctaaagatgctgtccaaattctgtcttcaggttccgattctgactaatatattaagccttaggattcttctgactttctttttttttgacatttacgttttttattttttcttttctttgtgaaagtcataggtttcaattttaagttactaaatagagtaatttacctttaaaa

SEQ ID NO: 987 - DNA, 522 bp, Arabidopsis thaliana
cggccgcatacagacttttctgatagtttatgagtttcaaaagtgaacttcttctatcattactaacgcttctgtaatcataacccgaacataattcactttcaccactgacgttaacttgccaaaatgtaaatcaagaggctcttgccgaagaagacttgccccggaaaccaacaacacttagtttctttcctggtcttctatctgaacccgtcttccccctcgcagcaatcgatctggatccaaccgtttttaatatttttctttttggctttgaagatttctctggaggagatgatgcttttcttggtttcgaaaacgaacttgaacttgactttctcacgggtgtcttcccacctgtcgatcttgcaggaggagatgatgatgatggtttgtctctggagtttcgttgcttgctcacttctctgatctgcttaacgcttcttcctttctcttgagtgatatgggttcttgcggcgtctctcctcacattatcagtcgtgagtgattctaagctctcgt

SEQ ID NO: 988 - DNA, 522 bp, Arabidopsis thaliana
ccacgcgtccgctcaaaaatggagtataggtttcatatctctcgcttttctcttcatcacttcctcttccgctgagctcctcattaaacaggccacagaaggcagaggaatagaatacaacagttctcacagttcacgaatggagtgacaagagtgtggagggatgaccgaccatcggataagattctttcgataaccagcttctcaataattaggacgagacctgaaccctatgaatcctctgtttttgaggctgttggttacaaatggagattggttttgtacgtgaatggtaatgaaaaggacggtggaaaagatcatgtttcactttacgcgaagatcgtagagacagaatctcttccagtaggatgggaagtgaatgttgatctcaaactctttgtctacaatggaaagctaaacaaatatttgattgttacagatggtacagtgaaacgatacaacaatgcgacaaaagagttgggttacggacaacttattcctcaatcaacattctacgacggg

SEQ ID NO: 989 - DNA, 522 bp, Arabidopsis thaliana
ccacgcgtccgcgattctctacgcgtttcagcgtcaagtcttctagatctctaaagccttcgtgctcgccaatataaatctctgagatcggtcccgtaaaatcggattcgcgtcgtttttgagtaaaaaaaatggcgcaacaatcgttgatctacagtttcgtcgctcgtggtaccgttatcctcgttgagttcacagatttcaaaggcaatttcacatcaatcgctgctcagtgccttcagaagcttccttcttctaacaacaagtttacctacaactgcgatggtcacacgttcaattacctcgtcgaaaatggattcacctattgtgttgttgcagttgattctgctgggaggcagattcctatggctttcttggaacgagttaaggaggatttcaacaagagatatggtggtggaaaggctgcaactgctcaagcaaacagcttgaataaagaatttgggtcgaaactgaaagagcatatgcagtattgcatggatcatcctgatgagattagcaagc

SEQ ID NO: 990 - DNA, 522 bp, Arabidopsis thaliana
gaaaaaaatgcaagctattaaacgattctaggactttacacaaagggtttgtgttagaacgaagaacaacaaagctagctttacaagtctttagcaaaaaaaagagaggattttgctagcaaaaagagctcagagctcaaatctcaaatcaaagaaaaaacagatgatcccagtcattgagcaacaaatccagattgaacatccatagtacagtgttaacgaaaccgggtttatcttggagaaaggcagtaagtttggtctttacagcgttatgtcctcagcagaacacgatcatggtggtacaagattactctaaatctcgctgtagttacgccatactgctcggaattcctccctaaatgtgttaaaacgtgccttcaagttcggtgttctcaagcttgcatgaagaattgttgcaagatgtgcaatgagtagcgcaaccgagactctgagcaaaccagaggaaatataccaaagagcaaaactcacaagtgagcatgtcaagacaaaaacccaacgggg

SEQ ID NO: 991 - DNA, 522 bp, Arabidopsis thaliana
  misc_feature (1)...(522): n = A,T,C or G
attgattggatacagtcctgatactggaacctgcaattacttagtgtcctctctctgtgctgttgataagttggatgaggcgattaaagttgttgaggaaatgagtgcagctggctgtattcctgatgtggaaagttatggggcggtgattaattcattgtgtttggctagaaagactactgatgtggtgaagattgtcaaagagatggtgagcaaagctgggatctctccacggaaagggatgctgacaaaagtagcagcagctctcagagccaacagggaaatttggaaagccattgagatgatcgagtttgtagaaagtcgggattaccctgtggagtttgagagttatgaggtagtagtcgagggttgcctggaggttagggaatacattttggcagggaaggtggtgatgagaatgactgatagagggttcataccgtatatcaaggttagnnaaaaagtggttgagcgtctgattaacatcggtgaatggaagcttgcttgtactgttagacaaag

SEQ ID NO: 992 - DNA, 522 bp, Arabidopsis thaliana
ttttttttttttttttttttaagtcaacgttaatagttaatacttaatacataaatcaagtgagagtgggtgatactttaatctgggtttttctttatttatacaacatcaaatcttagtatcgatgtaaaaagaatggtattttgataattgaacaaagtcacacaatgaaaagaatggctaggagaagtgttcaaagtaattgccagtcatcttcatgttcctcaccagagatctctgtagatgtctctgtactgctgctggtttctgcaatcccgcagtcatttcttctgtgagattgagtcacagtgaagagaggagcaccattagagtctccggctagctttgttgctcggatacagaaatcatcaaaatcatctttgtgctggcaatagaatccgagagctagtgacgggtcgagtgactcaagtggaacataacggagggtattgcaatggtaagacgatgtgtcaacatcttgattttctttcttgactgtcactacctgttgaacatcatgcg

SEQ ID NO: 993 - DNA, 522 bp, Arabidopsis thaliana
ttttttttttttgaaaagtaaaattaggaattgattattcttctcggttttgagaaacaaatattaagtcacattttccagtaggttgataataccctcacaacaaaacctctgtttatcatcacgtttcactatacctaagaacacctttctttccccacgcacaaccgatttaaagggaagaaaacaaatcttttccatcaccaaatgaatgagtcatgcgtgcaatcacaatttgaatttacatatgaagccgtccgttcccattagtttctgtccttgatcttcttgtgcccggtaactcctcatgtttcgcttctgaaccaattttgtaacctctctcgaccgattcagcttctaacggcagctcgtctaacgtccgattagcctgctgaagaatgcgaagagtctcttgcgtgcgtttcctctttatcgctaactcatcgggctctttcaacagttcttcaattaagttctccctgtaaagcttctcgatgaaaacattgtgcagctcacgtttcg

SEQ ID NO: 994 - DNA, 522 bp, Arabidopsis thaliana
cggccgcgttcaattccacctgagcttggaaacatgtcaaaactccattacctggaactcaatgataatcatctcacgggtcatataccaccagagcttgggaagcttactgacttgtttgatctgaatgtggccaacaatgatctggaaggacctatacctgatcatctgagctcttgcacaaatctaaacagcttaaatgttcatgggaacaagtttagtggcactataccccgagcatttcaaaagctagaaagtatgacttaccttaatctgtccagcaacaatatcaaaggtccaatcccggttgagctatctcgtatcggtaacttagatacattggatctttccaacaacaagataaatggaatcattccttcttcccttggtgatttggagcatcttctcaagatgaacttgagtagaaatcatataactggtgtagttccaggcgactttggaaatctaagaagcatcatggaaatagatctttcaaataatgatatctctggcccaattcca

SEQ ID NO: 995 - DNA, 522 bp, Arabidopsis thaliana
cggccgccgaagctttagcgcggcggatctaccgtctctctccgccgcagaatcagatcgatcattgtctctccgatactcttcagatgcacttttacgagacttgtccttatcttaaattcgctcacttcacggcgaaccaagcgattctcgaagcttttgaaggtaagaagagagtacacgtcattgatttctcgatgaaccaaggtcttcaatggcctgcacttatgcaagctcttgcgcttcgagaaggaggtcctccaactttccggttaaccggaattggtccaccggcgccggataattctgatcatcttcatgaagttggttgtaaattagctcagcttgcggaggcgattcacgtagaattcgaataccgtggattcgttgctaacagcttagccgatctcgatgcttcgatgcttgagcttagaccgagcgatacggaagctgttgcggtgaactctgtttttgagctacataagctcttaggtcgtcccggtgggatagagaaagttctcg

SEQ ID NO: 996 - DNA, 522 bp, Arabidopsis thaliana
  misc_feature (1)...(522): n = A,T,C or G
cgcggccgccttctcttcatcgtcgtcgtcggcgtcaacgctcagaatcggagacctaagaatgttcaggtggctgttaaggctaagtggcagggtactcctcttctccttgaggctggtgagttgatttccaaagaatcgaagcagttgttctgggagtttactgatgcttggcttggttccgatggagatgattccgattgtaaatcagctagagattgtcttcttaagatatctaaacaggcttcgactctgttagctcaaccagtggcttctctcttccatttctcacttactctgagatctgcttcgcctaggcttgtgctttaccgtcaattggctgatgagtctctatcttctttccctcatggtgatgatccctctgcgactggctgctgttgggttgatactggctcctctctgttttacgatgttgcagatcttcaatcctggcnnnnntctgctcctgctgttggagatgctgttcaggggcctgagctattcgacttcgatcatgttcat

SEQ ID NO: 997 - DNA, 522 bp, Arabidopsis thaliana
cggccgctattttacattgtaagagtaatatgcagacaaaaaggagattccatctgcaaatccacatttcttacaaatagtgcaggtacacttatttctgtttgtggcttttttcttttctctagagttgtatcaagtccattgattcatttacatggaaacttaaagctactcatagaaagagagagagtctcttggcttgtgttgataacttcactcatatatccatatggtgaccacttgtgttgggtggttgactttccaatggcatgtactgtgccatgatccctctaatttccgcatccatgtaactcctgattctgtatttgtagactgcatatccagaaagacctgcaacacccaccccgattataaggatccacaaaaagctccagctgagttttgtggttccaactttgcctgaacctatgcaagtgtcgtgctcacgcatgtaaagcaaaccgttgctgcagctgcattcataacttccccaagtgtttttacatttacactctgggcact

SEQ ID NO: 998 - DNA, 521 bp, Arabidopsis thaliana
taatcagaaaagtctacacatgacatttgaaaatgcacagtgtcgaataagatgaagcatctggtttaacagactggtaagtctttctcgaagaaaggtgaaatcccaagtaccgggttcgattcgaagaaattgaccggtttaagttcaaagctagatgctattgttggcatcactggaaaatcttcttggcacggtacgtgatggaaccctagtgtataccacaacactatgtccttgttctcaatggaccgatctctgtcggaccaaacttgtagtgtgtcttcaccacggctctggtacatcaaaagccctccagcccattgctctgaccggttataccgagtcacccatatctgattgtttgtgaaagcgcctcgcatttgcggtggatcatcatgatcgagcaaacttgcagcattaccaccaggtacaagcttgtaaccagccgggttccctaaccgagaaagtcggttagggttcacaagatggaactcgtaggggtcgtacaggctcatctt

SEQ ID NO: 999 - DNA, 521 bp, Arabidopsis thaliana
tttttttttttaaaactttaaaatcggtgaggtttcaatatcactacattgacaggaatagaaatatcaaaattaaaaatgaaaacgaagagaaacgagaatctccagcgacagttactctgttgatgatgaagtggtggaagaatcctgcttttggtcgccaaagacacgttgacggaaatctttgaccataagtgggagtccttggcgtagagccacctttggttcccaaccaagaagctctttggcctttgtgatgtctggtttcctcttgtgtgggtcgtcctctgtgtttggtctgaactctatctttgcgttcgggtcaattgtctcttgaaccaccttagcgagctcgagcatggtgaattcaccggggttaccaaggttaaatggaccgacatgttctccctccatcaacctcatcagaccttccaccagatcagagacaaactggaaactcctagtctgcttaccatcaccataaacagtcaaaggctcttttcttaatgcctgggcaacga

What is claimed is:

1. A nucleic acid comprising a sequence capable of hybridizing under stringent conditions to a sequence set forth in SEQ ID NO:1 to 999, or a fragment thereof.

2. A vector comprising the nucleic acid of claim 1.

3. The vector of claim 2, wherein said vector comprises regulatory elements for expression, operably linked to said sequence.

4. A polypeptide encoded by the nucleic acid of claim 1.

5. A nucleic acid comprising: an ATG start codon; an optional intervening sequence; a coding sequence capable of hybridizing under stringent conditions as set forth in SEQ ID NO:1 to 999; and an optional terminal sequence, wherein at least one of said optional sequences is present, and wherein:
ATG is a start codon;
said intervening sequence comprises one or more codons in-frame with said coding sequence, and is free of in-frame stop codons; and
said terminal sequence comprises one or more codons in-frame with said coding sequence, and a terminal stop codon.

6. The nucleic acid of claim 5, wherein said nucleic acid is expressed in Arabidopsis thaliana.

7. The nucleic acid of claim 5, wherein said nucleic acid encodes a plant protein.

8. The nucleic acid of claim 7, wherein said plant is a dicot.

9. The nucleic acid of claim 8, wherein said dicot is Arabidopsis thaliana.

10. The nucleic acid of claim 7, wherein said plant protein is a naturally occurring plant protein.

11. The nucleic acid of claim 7, wherein said plant protein is a genetically modified plant protein.

12. The nucleic acid of claim 5, wherein said nucleic acid encodes a fusion protein comprising an Arabidopsis thaliana protein and a fusion partner.

13. A nucleic acid of claim 5, wherein said nucleic acid encodes a fusion protein comprising a plant protein and a fusion partner.

14. A transgenic plant comprising an exogenous nucleic acid, wherein said nucleic acid comprises transcription regulatory sequences operably linked to a sequence capable of hybridizing under stringent conditions to a sequence set forth in SEQ ID NO:1 to 999 or a fragment thereof, wherein said sequence is expressed in cells of said plant.

15. The transgenic plant of claim 14, wherein said plant is regenerated from transformed embryogenic tissue.

16. The transgenic plant of claim 14, wherein said plant is a progeny of one or more subsequent generations from transformed embryogenic tissue.

17. The transgenic plant of claim 14, wherein said sequence capable of hybridizing under stringent conditions to a sequence set forth in SEQ ID NO:1 to 999 encodes a plant protein.

18. The transgenic plant of claim 14, wherein said plant protein is a naturally occurring plant protein.

19. The transgenic plant of claim 14, wherein said plant protein is a genetically altered plant protein.

20. The transgenic plant of claim 14, wherein said sequence expressed in cells of said plant is an anti-sense sequence.

21. The transgenic plant of claim 14, wherein said sequence expressed in cells of said plant is a sense sequence.

22. The transgenic plant of claim 14, wherein said sequence is selectively expressed in specific tissues of said plant.

23. The transgenic plant of claim 14, wherein said specific tissue is selected from the group consisting of leaves, stems, roots, flowers, tissues, epicotyls, meristems, hypocotyls, cotyledons, pollen, ovaries, cells, and protoplasts.

24. A genetically modified cell, comprising an exogenous nucleic acid, wherein said nucleic acid comprises transcription regulatory sequences operably linked to a sequence capable of hybridizing under stringent conditions to a sequence set forth in SEQ ID NO:1 to 999, wherein said sequence is expressed in cells of said plant.

25. A method of screening a candidate agent for its biological effect; the method comprising:
combining said candidate agent with one of:
a genetically modified cell according to claim 24, a transgenic plant according to claim 14, or a polypeptide according to claim 4; and
determining the effect of said candidate agent on said plant, cell or polypeptide.

26. A nucleic acid array comprising at least one nucleic acid as set forth in SEQ ID NO:1-999 stably bound to a solid support.

27. An array comprising at least one polypeptide encoded by a nucleic acid as set forth in SEQ ID NO:1-999, stably bound to a solid support.
